United States Patent Application Publication US 2026/0265781 A1 - sequence listing, part 8

SEQ ID NO: 22 - DNA, 26290500 bp, synthetic construct (residues 15,336,126-17,527,000 of 26,290,500)
  source 1..26290500: mol_type = other DNA; note = Hot spot 1 - Chr 3 contig ref|NW_020822499.1 from Cricetulus griseus
caaagaaaatgatcttcttttgtcatatatgctacaagcatttttgaaggtgacagagaaggcttgtagattcaaaatacctttattcagataaataccagccaagtgcaagccagagcgtgcccacaggtcgaaagcaagcgtggccagcgagaaggggcaatccacgtgtgctccatcccttaagaattgtccctgcatcatcttttctcctcccctgaccacaccctcatgggcgtggccaggcatacctgttggggctactaggaggcgggcctacagtgtctccctacaattccccttttagtctaaaagaggattaaaacttaatagtgtaaaaaatccaaaattaacaatcataaagacaataatctgctactgcacatcctaactatgtctattccggctaagccgtaaagtcatgtggaaagggtgtctaacttgaacacctccttccaatcccaactctaaacaataagaaagttattcctagctaggcttacactaccctaataaacaataatggggagtgggggcatagcatcttcttagttacttcctgctgaaatgggacgatggtagccctgtggaaaaaaaatgttagtgtagggaaagtctctaatgggttatctctagtccatgttagatgggatttgcttgattgaagatctaggtcgaagtcctcaacttgattaaagtcagtacttgaggctctggttggagtgtcagttgaaatggagtaagttgaatccaatgcatttgaaaaggtatggcccaattccttttccggagcatccaaggattgtcgtcaggtgggtcttcattggatgtatgggactcaaacataagtgtcagcagagaaatgtgtgcttgcacatgtatgtatattgggaaaggcaatcattgaaaatgacaattatgagagggtatgggccttgaaagaaagagccaagaaaagacaaaagatagtcctcaaattcttcatttattctgtattacatcaattggcttcttgatataatacagaaactctaaaatttagctaaataacatgtttggattttaggggaggaaagccaaatccaattctaaatccagcgttgatttaattgaatagggactaggaaatgaagagaaatagagttatttgagagacagctgtaaagtttatcatatggcacgttccttttgtttgatggttatagctatcttttttcctttaagtatctacccatgcagtgtcctttgacttctggaggtgagtttttctgtgaagataaaaacaaagcatttaccattcctttgggaggctttcatttagttcatgagatatacctcagtaaatacctgtcagtcatccttgtcgagagggttatcttttttaactcgaaccttgatcaattttgatggtatccaaagtttttttctcctgtggaaacaaatgcaaaacccctaccccaatgtaacacatgtcctggtttccatactgaggtcagtacatctttgaagtacactggctgattcagttcagcagttttttccgtagtccagtgtcttttagcagctgtttgtcctttgtcattggcattaagaaagtttagtgtcaataaagcattatgtaacctatgtttggggggttttgacttaccagcttgcctatgtagcatctccttaagcgtcctattagacctctcaacaactgcttgtcctgtaggattgtgtggtatacctgcaatatgctttatgttataatatttgaagaactgttccatttttgtggagacatatgctggagcattgtcagtttttatctgtgcagatatgcccataactgccatcacctctagtaggtgtgtaataacggaatcagttttatcagagttgagagaagtagcccattggaaacctgagaatgtgtcaatggtatgatgcacatatttcaaatttccaaattctgtaaagtgaaagacatccatttgccagatctcattcctctgaatgcctttaggattacagccttctggcagtggagtttggttataaaaggaacaagtaggacagtttctcactatctccttggcttattgccaagtgatggagaagtccttctttaaacctttgctatttacatgatgctttttatgaaattctgaggcttctagcacagtgcaattaataaactatcaatctcattactgccttgtgctaatgggcctggcagacccgtatgggatctgatatgcgtaatgtacagaggattacttctgtttctgattgtttcctataattgtaagaacaacaaggttagttcagtattatcagggacgaattctgcagtctctatgtgtaagatgactctctctgtatattgggaatcagtaactatgttaagaggttttgtgaaatccataagcaccatgagaactgcatataattctgccttctgtacagatgtgtacagaagtccgtactttgaactactttacttacctctatatataaccagccttacctgatttgttagcgtcactgtagaaggtaagaactccaggaataggagtttgtcttacaatgcgtggaagaatccagactgtcttttttatgaatttaattctgtcggttttgggatagttgttactgattgttcccaaaaagtcggtaagagctatttgccaatattcattatccttccataaggaggaaatttcatcattagttaaaggtactataatttctgctggatcttttccagtcagctgacaaagtcttaatttgccctttaaaatcaaatcagaaaccttttctatatacatttaaaactttttattagaaatgaagaaagattccaattttacttttctgccagacagataatcacttttaccaccatcatttattgaatagtccatcttttctactctgaattaaaatgtcacctttatcacattctaaattcccatatgtgtctttgtctatttctagactcctcattctgtgccactcatctgttttttcatgaaacattaccagtttctgttaatcagagacatatatgaatatgtgaacatgtacccatatgctgcatgtagatctcttatccttattattaaccctattttcatttatttaattagaattatttatttataaaaatttctaagaatttttctcagctattctggctggctcatccttcaaaacaaacgaacaactcagaatcgacttaattagggcaaaacatggttctgggatcattaatgagtaattttgtagaaatactatctttgccaggcagtggtgactcaagcctttaataccagcacttaggaggcagaggcaggtggatctctgtgagttcaaggtcagcctggtttacacagtgattcccaggactgccaatgctacacagagaaactctgtcttgaaacaataaaataaaataaaagctatctttatgatattaaatctttgatttcaagtagtagaaagctttttttctcaaaaattctgtccagtttattattgggtgtgcactttgttgttcaagttgggtgttactcagtacaggaaaaaggagttttcatctattttgttaacttttcttattattattatgattttttccagtgcatattgcagaattttccagttatgtaatcacatctacttcaaatagtaatacttcagacttgccctaattttttaaaaactatttatttacttattatgtagtgttctgttttacagatgtgcctgcaggccagaagagggcagcagatctcattacagatggttgcgagccaccatgtgggtgctgggaattgaactcaggacctcgggaagagtagccagtgctcttaacctctcagccatctctccagcccccagacttgccctaatttttattcctcttatttcatttggtgtacaattacactgatagtaataccaataaaataagaagaaaaatactccttttcctttgaataagcccagtcttgaagctaaatctctacaagagataacagcatttagctgctatgagcatgcagccctggcatggtcagtgtctagttttgctgggttatgtccatgctcattcatgtattccctgtgtttgagtttgtggtaacagaaatttgagtatggcaatagtccataagcctaaagtctaaactactggcatccatggtctaggacagtggttcttagacttgtaacaccttagaaggattgactaatacaagtctttgctttttaaaggcagataggcaacaaggaacatcataggaagcagacagaggtagacagaaaaaatgaggtgcccatatgtggccatatagtcaagatctggaagttcccttccaccaagacccagaaggatgcagtttggtgttcctcaaaacataaaactttgagttatggtatgaaccagcatttttcactgctaaatatataccctaaataactggatgctattaggaacgcaaatgtgagcaaacagttgtctatcagtgcccatggcagtttattcacaacaccccaaagctagaaacagcatcagtgtccatcagctgataattgtgtgaagaaaaggtggtttatcctacagtgaatggtaagacttaaaaagaacaaaatgctggtatacaacatgaatgaacttcaaaagtttgtgcttggcaaatgaagaatgtcatcaggtaccactattagaaaatgcaggagaccatcaactcaaaaagagacttcgaaggctttagtcagtatcagttggcccactgcttttgggcctgcaggaggcagtacaatatggtgggagttcatggcagaagaagatgcttggggcatgcaagccatgaagcagaaaaggcagaggcccagatgggtgtctcaagttcccttcaaagagcatgttctcagtgacataactttctatagctacgcaggtcccactgcctcaagacgctactaactttcagttgctccacgctaaggactaagccattaacacaggggacctggggtgggggtgcattccagatacaaattatgtcatttcaccttaagtcagtgtaaataagataaagaatgaatgattccacttttcttaccttgctttttttctgaacaggggcttgcaatgtatccttggctagctcagaagtcaccattcctcctgcctcagcctcccagatattgggatacattaccacacctggctttattatatagaataattgcctttacaaggacagatagtataatagagattagcagggaccaaggacagggagaatgtacaactgctggcttaggggtaccaattttaacttagagtttatattggagatatatgaaagttctggaaatagatactggtgatctatttaagatcataagtgtatttaacactatttaattttacattgaaaatgattaaatggtaagcttatttactgaatattttaatgttatatatttaatatttaatgttatagttaataaaaggaatagctcctgaacttgtccatttaaaggctgctggagtgtgctagcaaatttatccattaggccctctgtccacaagctaggtactgtttctgattatgattccctacttgtccaacctggctcttgcaaggctaagtgggctgcctgggaagaccacgatgtgaagtgtggagaaaccatggtcagctcttttggtgcagtgtcagcagcatgagccagagcttgtgtggaaccatctaccacacctctgcctgaaatcagggatgggttgagtggaagggacttggggtccaaaatgtttcttgcatgcactttagacacttgtgcacttacagatacacagcagggctgtctatagatatatacatttctaatactttaacttacacaaatacgaaatcatgtcatttggcaattagcctgtttttcttatggacacagttgtaatcttgtagtacagagacaccttaatctctttaaggtctattggataccctcgtgcatggaggctccagaaagacttttattttacccactgtagttgtacttttgtattcatgataacaaaaagactcttgtcaaagtcactaatgatttttgtgtctccacatctaatgatgtatgtggtgtgtgtgctcgtatgtgtatgcatgtgtgtgcttgtgtatatgtgtttgtggtgtatgtatttaattcatgagcatgagtatatgggtacacactccatgcatatgacagacaaagatgttggtttcccctgtggttctctgtcttgagacagggtctttccctgaactgggagcttactgtttcatctaggatggctcattagttagcctccagggacctacctgtgtctgtccccatgagcatgcactcatgaccagctttttatgtgggcgctggaaatttgaactcaggtcctcaggcttgcatagcaaatgcaattactcactgagacagatcccagcccacagtggattccttctcaggtgtatctaacataggtgcctcctgctgtcatcttcctccatgtgtgttctttgttgtttccattaggggtgtattctgtgtttcaagtcacatagctttaaaaggatgagcaaagtaaaatcgtgattataagaaagaacaggggtctcttttcttcctttctttttaaaatgtttttccaagctgcctgcccttgaattttctctaagcaggaaaaaagatgctcaagaaatgtttaacttaatgtttgaagaagatatctactaattatagtttgcaggactgtgcaacaaaataacacacgtgtggattccagcactctgcattctttgctcacactgagtgaaataggctgttattagttgaggattatgtgggcaggacgtaaatgaagggactgtaacaattaagtgaaaagacatcattttcttcttttcatgtcagtacattttaatgcctttcaaaagccaatctcacttaattgacatcatttcaggagtcttaggagcatttgcgcagagcttttattaacctgtataatttagagttgacgattgggaccaagattaggaactataatgtttatgttggtaggaatacaaaaagcacacagccatcttggttctggctgccataacaaaatactgtagagcaagtgactggacaggatttttgtacatctcatctggaggaggggacgtacaaggtctaggtgccggcagactgggtatctgctgttgcttctcttcttggcttacagacagtggcttctcacagtaccttcacatgggaaacaaaggaccctctcctgcctcttcctgtaatggccttaatcccattgtagggatgctaccctcatgaattcatctaaaacatgaaccaccacatctagtctatgtgtcctggggatccaagccagaacctcagcgatgctagatagtccagcattaactgagcctttgtcatgtatttctcatgctagcatacagacataataaattataaacaaaatactaagtaagatgtaaaaccaataaaacttgaattagtagcattaacttgacaggagatgttattttttctcaaataaattgctcaggttatctggaaaaacaccaaaagatatctactagtaattgctatagataatcaaggtccatatataaatgtaatgttcatgatattaataactttgagttagcgaaattgctcagatgccaatcttcacaaagcatcataactgaaaccatctggccgtcctctgctactgaatccacattaattattagctagttatattactaccagaaagcaaaactgaaagttttccaggctagctgtatgttaactaccatccaaaattatttcttatctattctgaacagttgctgatgtagcctgaaatcaggttctcatgggccgggcaagtctaaacccacttctctgcttgctctatgttactttcgttttccatctccctatctctttgaaaagtcatgttcactattcaaagacagtggtagctgctgtaacagccaagccctgcattttcaacggaagaacccaccaaagctcatgtctcacttctgccacagtctgcttagaagcattttgtgtttgtcctttaagggtgtgactctatctgcctttactcttcagggcccatctgctcagccaacaaaacaaaacagatagaggactctgcggtggggtagaatttggggtgtagttgctaccagtggttggagtctgggctgggtgtttccaaggtcttgtcctctggttgagaatgaaatagaggtctacgtagacagaaaagtatcaaagaaacttcaagggaaaaacagcagttctggttagaaagaactcatcaagagaacaatggggcacatgagtaaaaggaagggccctgattactgctatggatttcgagagatggaaggagtttggttagtagagacatagttttggtggttttctattttgatggatgggctttggttacgtaaaagtccttgcttactgcacatagcccatcccataatgcatcatatatttgcgcaactatgcataagtatggtagtacatagaggattttacctaaaagttcacattgaggacatggttcccctcgttatatacactccccaaacaagtctagaaaagactggcccattgcccattattgattgtgctacaggatgggtctgaatagaaatgacgtatcagcagaggcctgctaaggggactgatttatttccatttttcaaagcaggtatacatgtacctctatacaggaatgtgtgtgtatgtgtgtgtggtggaagttgtggttcctgggttgctaacaggttgctaggttcataatccaagtaaatggaatctcaggtttctaagcaagttcctgagcttgtctgtttcgcagtggatgttttatgattcagttctagaaatggtgtgatttcaatatggcttccaaagtttgtgggttgggaatttaattacccaaacaacaatgttgtgtgaggtaggatcctgaaaatgttcagaggttcccagagctctgcagctgtgctgtcataaacagaataagattatcatctaggggatgggtccactgaccatataactaatgcatccgttataagggtatgtcagctctttggtctttctagtatctttctctctttctgaatcctctatctctgtctgtctgtctctccctgttttccttctttaatgagatgatagggcaaaatagtcctcattgtatgcagctcccatgttccagaactgtaagacataatttgtcttctttataagcccctcagtctcaagtataatagtctctgttataacagcatgaacaaactgaaagaacacacatagctagtacctttattctgccctccatgagtcagtcatctggccatacctaaatgcataggagctcagtgcatgcagtctaggtatgtactaaaagggaaaggaaacaataaatagactccaaatagtcctcattttatgacattaatttttatatacaaaatttatatataaatcatatagtttatatgtaatgatttatatgtaaaatagtttacataaatcagatcataaacacaaacaccaaagtaaatcctcttgtcctgtggtacatcaaagtttagatggccattgtgaagatgtttgcttcacaaacactttatattagagatgaaatgatgccactgaatgcaaaatttttctttgaaaatggtggggattcagagaatactttcctttgaggtctgtgagccttagctttagaaaacattttcctaactgaatctctaccctactcaagtggaaatgttcctccacatcttcatagccccagtgtcttcttggccttggttgttgtttatgaaaattacctgcctagactgtgtgcctttcttttaaaaaaccgatacaagttcctgaccatgtagccaatggtgctgtattctacattgttgattttattttccacacatttgtcttacatagagccagaaatatgtccacatcatcattagtttatgaataaatgatttgttttatgaagtggattataaaccagagtctggagaaattttgtactcaggaaaggcaggcagagagacaggcaggttgttggggattataaaaagggttaaacgaactcagccttaaaatatctttcttttctgttttttaatgttaagatgttctttataaaacaatgacttgatcatcaggaatcatattgttaactaccaaaaattcctatagcacacataaactggtgtataaatatacttatataacttgaatgaaaatttcccatttggacatagacaattcaacaaaatgcctcaacagtaggcatgaaaagctctctttgagctgctggtcagggttatccaagagagtcccaaaacattataggctattgctactgcacttgactgccccctcgcataggtgggagggtaagtccctattgctgaagacaccatatacttcagcaaccggggccagagatgggcaatctggaaccgaccttaaagtctcccctctgaggactagcttttatgataccaaggcaccacacaagattccaaaggagggaagcaactaacagtcatacttagctatgatgcctgtgaaccaccacaacaaccatcatgcaatgctaagggtgcagtaatggcaaacacagctgggaagaagccaatagctctgtaattggacttaagatctgttccacaagaggaaaatcttgtttggtgctgaaaacctagccaactactcaggcatggatcttggaggagaacctacaaccactgctgatagatctgcaacacaacacctatacctaaggctcaaggatcattgtggaaaaggggatggaaagactgcaagaatcagtggatcagggagtttgctatgggattgtatctcctagaaatgtcagaagctacactaacgaagtctcaccaaagaagctgtctgagcatgacttgaaggaggacaatttatatgaaaaagagggaaagaccattaagcctcaaccccacacaaagaactacaggagactagagaacgctgagagcaggtgaagtagtcttccccagggaagagcttaagattgtaagaaccagtggggctgggagacaccatgaaacagtgccttacagacatcacaggactgatggactcctatgacctcacagagattgtggcagtgtgcacaagcctgcacaggtctcagctacatggggtcctagtgctgagaaggaggaatggacaagagctcccatgcctaattcagaagctgtctccaaagcaaatcacactaaccggcaggcaccataccaaactgtagacggccaacagaaaatgaacgcaatcgtacttctgtaggggaaggtgttttgtctcatgatatttggtttgggcattttttgccttatgggtcttttgctggatattatgtttttcaattatgtgcttttaaggtgtgtgcatttcttatgctttctctttgtccctcccatttgtttgttttattctagtatgactgttttcatatttgcctattgttttctaaagagtcagaggaagaaagtgtagagttggatgagttggggttgggaggatccaggaggatatgagggaggggaagccatgatcagaatatagagtatgaaacacacacacacacacacacacacacacacaattaataattaaagagtccatgaatttgaaaaagaacaaggggcatacatgagagctgaaggaaggaaaatatataattatatcttaatctcaaaacataaaaaataaaataaaaaggtgatgataatctgaaggaaaaaaatgatgagaaatggagtacagttgttccagtccctacagaaccccaagaagaaactgaactcaaagaagtaagataaagtccttaagaatgggttcaagcccagggggcacctgtctgccatctttaacagggtcacactgtttttaaggaggaagtcactccttgagattacaggagaagaaaagggctctgtttgtgtttgtcttttttaaagctgaggaaatctttttttcttcagatttttttaatttgaattagaaacaagattgttttacatgcccagttcccttctcccttccttcctcccctaccatgcccccaactaaaaccctacctatcacatatcctttcttctattcttcccctgactcaaccttttgctccctcatgacctctgcatccttccttttcttcccttctcattcttgtagctccctcccccctcttcctgggctctcaatttgctcaggggatcttgacctttttcccttctccaggggtcctagcttcaaactgaggaaatctttccagacatcattcactgtgtcgaacaccatcaaaagaatgacatatggccaggcattggtggcacaagcctttaatcactcgggaggcagaggcaggaggacctctgtgagttcgaggccagcctagagccagttccagcatgttacagcacagcttccaaatccacagagaaaccctgtctcgagaaaaaaaaaaaaaaagaatgacatatagtaaacattgcctcagggaactgtgagagaggcttcaggaaaaaaggcagagggccttttacctcaggtgaatttccttccctggatggttcttggatgtggtttcatgcctctgacatatctattcttgttgggtgtcagaatatagctatagaacccaatctggtcagtgtatcctgaatctaggtacagccttctgccttgctttcatgctaagcaattgtgtttcaactggtctgtcctgagaaagttctgggaaagggctgatctcttaatatttactatgtgcttacaggaataaataaattacatgttttcctgatctgcttttctgaactcaaataacctcccttggatcatagcttcctttctttgtgtcattcatatataaaagtacactggatggccgggcgttggtggcgcacccctttaatcccagcactgggaggcagaggcaggcagatctctgtgagttcaaggccagcctggtctccagagggagtgccaggacagcctccaaagccacacagagaaaccctgtcttgaaaaaacaaaaacaaaacaaacaaacaaaaatccactggaactgaaataaggttgtctatattgttagactttcgtctgccccattctttcaggttctcagattgcaggtctctcagacagatctgcacaggttgttgaaattgacataccagatctctcttaattcactggctaaaaatgtaacacatttttgcatgtggtgatgtcacctgcaatttctctcctgagaggtgaaggcaaggggactgctgcaagtttgaacccagcctggtttgctggatataatacattcccacccaatctgagctacagtctgagaccatgcttctgtttcaaacatacaaacaaacaagcaaacaataccatgtgataagaagcaatctaaccattatgtcacaaacagtaggccatccacttgggtgatcactgagtggcactgagggttactttccttggtgggtagatagctggatctgtacacacacacacacacacacacacacacacacacacacacacacacacacacagaggcaggggaggaccattgtggggcattgtggtccacacctgtaatctcatacttgtgaggctgaggtagaaggattataagtttatggactatttgggctacatgggaaggcctgttccaaaacacagaagagattatgggaaatgtttgctagtgtcaataattgagatcagctctttaagactgacgctgggagcttctgactaaacaaagtgtcgctggagcaagtagatagaaacagaaacatgcatgagaattcagatactgagaggacacgaagtttccttgtttctttcttttgaaccactaagtacttgataacttatgaaaacatctgtacatactgtataaaggttcctccctcagtcttcctcgtgctgcatcaagacaactgagcaccataaagtcacccggcaaacagaggctcccatcacaaaattgatgacgccaacccgcctctcaggagctgaagacattttataaggaaagaaaatgaaaccctaggagatccatagacaagtcaaacaacatgcagactttttaaaaattattttttatttaaattaaaaacaatcttattttacataccaatcccagttccctctcccttccatcctctcattcctcccaccaaccccccatcccaccccacccccatccacacctcagggagggtgaggcctcctatgggggattatcaaagtctgtcacatcatttggggcaggaactaggccttccccaatatatctaggctgagagggtatccctccataggggatgggctctcaaagcccatttgtgcactagggactggttccactgccagaggccccatagactgcccaggccccccagcatccacaatgtacagactttaagtagcattttctcccaaaatatgtcaaagcagtctaagtacgtggaggaaaaaaatgaaagatacatgagttccattagtagtcacaagaatacaaatgaccatggaaacattgcactggattttttttttaaagcttagtactaacagtttcggagcttgtagaaataggtgctctgatatgctgatgggaacacacttcctgtgtcctttctgattgtcacttttatcattatgtgacaaagggttgttggatctctctcctccccacactttgggatcatgtggtgcacagactgtatttgccacaactgagtctaccttgggcccagaccactagactttcaccagatgtatatttaatttttatatacttattgaagggtcatttaatttttattaataaatattttaagagttaagcacagtctttagtatctcattagggttccaggaatctacatgaaagatatgagttatataccaagaattttttataaagatatttatcctgctgatatttataatatttataaatttataaatataatatttataaagatattcttgctgaacaagaaaaaaatgttagaagaaataaaagtagataacaataagggattatctttctaaattttggcacattcaggataacagctattaaaaagatcattgtagatgatggagagatggctcagtatttaagagtattggatgctcttccagaggacccaggtttagttcccagcacccatctgtaactccagttcccaggagatctaatggcatcttctgtactcctcaggcaccatacatgcacatggttcatacacatgcatgcattcaaacacacatacacataaaacaaatcttttaaaagagataattgaaaaaaattggtaccatacaaagttgtttataatatatactatcaaatcaaactagattctgtttaaaaacatggagaggtaaatgtgtaggaaagtactgtgagaatatatagcataacgacaacagtcatatggcactctaatggcaagatagcttattaatagctaccattcacctaacatgaattgctgctgttttgcttcctttgggacaaaatattgtggagctgttacaaggctggccttgaattcacttggaagtcgaggatgaccttaaacttctaaatttcctgtccccaccaaatgggtgctatggttacaggagtgctacaaccaactccgtttaataactttttcttttcttctttaataatgagaaatggaaatagaagtccttttgtttaagtgaatgatttgaagagagaatgtcatccaaatgctcttcatcaaatgtctcttattttggtaaataacaatgatgtgataaagatacacactttgtcaaccaaactaagcataaagaaccaattagccatctttttgtgacagattgtgggctgttttcactgtgatatccacagaaaagatttaaaatattataaagattacaaaaagaatcacctttttgtgtaaaccatggaaccggatttttcacatctggcctgcttggctcttctattctaaagtcgagcttctaccctgtgaatcttggcagcaagaatagtaacaccatgataagaaagctcttccctgcccttccgcacagggttatttaaacatctttgtaagcacacttatcaataggatgtaggagtcatatcattaattagaagaaatagaaattcttttagcaaagatatgtgacttgtttttctttttctttcttaactctaagcatttatcatgtgactggatgctactcaaaactgattagaagcactggggtcttatgttgtttgcttttggcccatctctgaggctgtgggtgtgactcgccatggtatgttgaataccacccacttgacacatgggatctagtatctccagcatgttttgtaaggtccgccacttccatcagaaacttccagggaactttgtgtactctgggagatttgctcatctgttttgctcttaccaagccttcctcccatcacctgacttgaccccaacattgcatcattcagaaactggaagacaagaggcagaaaatgagtctacatttttcacagaaattacaagctgacctgcattagcactggtcaacttctctcctttccacgattagtttcctttcttggctctggctcttatgttgacccgtgtcttcagggagtgtcacccatcacttttctctcagcttcttccttccacagtgggggtttccatatcttcttgagtaataccaatgaaatggcagcctccaattactaagccttttgtctatactgaacagaggactagtaacttttaaagacattacattattttcccttatctcccattttaggatgttttctatactttacataggaggaaacgacatctcgaaagggttaagcaccacccaggattatgccacgtgtaagcagaatagcacacattcaaaacaaaccgtggttatgagattatatcttaatcaggggtgacctccaaaaaattcctctttgaacttgggcagtatccatctacctcatcatggacagacttcctggagacttgtgcatacttgccacctcctcctccctatgcatgccccaacacacagcctcttggcatatgcccacatcaccgaaattgctctgggcaacatcaccaattaccttgctgtttcttgactttttggttgtgagcctagccttttatgactaggccatctctctagttttcccttcatgtttctaccgccaaaggatcttgggtcctccatcataccttgacttatagcacccctcatattgttgacaatcttggctttaaaatggtctttaatgggctttcataagatacccagcttacttgtttccctgctgcttatctctgggatttaaagttgctccattttctgtgttcagccctctgctctggaacagtttcatgttgacagaacatctgatatgtctgctgcctgaggtaatttgggactgagattgggaacatgtgacaaacctgtgacagccaagaaaatctctgtatctctctgtgtctctgtctctcctctctctctctctctctctctctctctctctctttctctctctctctctctctcacacacacacacacacacacacacacacacacacacacacacactttcttcaactaggccccatctcctacagtgtttaccactttccagtaatcaattcaagtatatatacatctgtgaattaatacactaatgaggtcagaggcccccacttctgaacattgctacgttgggttcaagctttcagtacatgagtgtttgagggggaacttcatgtctaaactgtaaccatccttcatgggtaaattgagttaggtcaggtttgtcctcttttcattatgaacactgtcctggggatgtcatttactcccagggtttcattttcactgttgataaagcccacatctgtctctggagcctgactctatcctgacctttagacttgatatgtctgctgattgtgggacttttgactatgtggctcctaggcctgcagaaccttatttctctgagcatacctctttttggaccctcatttttctcaagtgtaaaatggagaacatattcattattatctgatagcggtatcctaaatgttaaatgaaaagctatttggaaggtgtttatgacagtgtctctcctatggaaattacttagcctatttggagagactttatgagatggagactgaaacatatcatggaacacattttgtgggccagctccaggctttattttcctcttgtgcttactcagagaatctctcattttatcacctttgaaaacactacatgtttccatatattcataagtacatagggacacacacaccctgatagaagcaaattcacttgtacagtagttcccttgatccacaggcaatacatctcacaatccacaatggtggttggttcacaggttggaatgattcctaaataagccattgtgtcctacacatatattccttttatcaagcttattaatcaatttggcaccaaaaatattagcaagaataaataatcatcaaatagaccaactgtagcaatatatcatggtgaaagttatgtgaatttactccccgtctccaagtatcctattgtatttcctcttcaaaggaactctctccagcttctcattggcttatgggaactgccagaattattgctcttttgctttggggacattatgaaataaaataatagtgcttgaacccaagcagcgtaatttgataagagagagctcttaagtgattaaagactatgtagtggctggctacacaggaactgggtgacttatatcccttgtggaatggatataagctggatggagtgggcttcatgctactgaaaaagacatataattaaatttttattatttatttatggattttccatttaatattttcaaagtagagctgaccacggaaagccagatccaataagggaacatggctgctcagccttatagccccctttaaaatctagtttttatttcaaccttgatgtcaatgccttcatcattttgttaggcatctctttggatgttgtacccggatgtcacgggtggtgaacacacactctaatgatgacctacacctccagccacataggtttaagatgacacagcctttctaccatctcccattctcatagggaccaccttctcacaagctttattcacctgcactaaaggtcagctctttctagctcccttcctctcagacagtggggaaaggggttcagctttacatctggggagatgtccatgacctgctaaaatccctgtataactttttttaattctggaatttattttctgattacgattgtctgtgtgtctgcgacattgttctttactttaagatgtcttctcagaagttatcaaaacacttcttgtagactttttagatgctctctcctgttctttatttcccttccctctagccagctagccttcttatttctcctctgtgaagaacacatcccagagttgtttcctccttttgtttttctgtgtgtcattgtaaaatggacattgcacactttctaaataagtataacgagaaagcataaagcaattgtcttatgctcaaatgactctgattaggcaaaatagcacccagggacagtgcaaagttcgtgaggatagatctaaaaatctcaagtcatgctaatgttgggtgggcagaacatctgtgatacagcataccacagttgccaagagaagaacacaagggcaagttttacatgaacatgcttaaaatgccaacattcagccatgggtttgggggtaagaatgttactgcaggctgtggtgggaagattcaccaaggccctttaattcttttctctttgtcagttgtctgcagagtcgagagctactgattgcaatattaaggaagagtaaaatgccaaatagcagaatagatttctgtgacacttcataaaatgtgagaatctgtgaattgtaaatgtaacattatttttgtgctacgaagaaagaaaacctgctactacgtaagccataaatgctgccgattgcaatttaacttgaaatggcagtgatgatacaatgtgaatgtatgtagaattcagggtttgctgtgtttgtcttgattgtggcgagattgctcatagcatgcaggaaaaaggcctttagctttgaaaaatgtgttgaggcatcttagtggaaaatcctgtatggtaccacagtgaaccaggcacctcctgatgactggaatttgatccctgatatccatggtggagtatgtaagttgcctctgacttctacatgtggcctgtgtcttgggggcgcgtatacaacataacactaataataaaatgctttagaaatgcggatggtgatgtttaactgtttggggagcattcaagttgacacgtatgtggaaattgcctggcaccagtgcggtcaatacttgttcctgtcttcatttttttctatcatgatgctgcaaattgcttctgtgcctaagaaagggcagcagtaactatcacactgatgacagaaggttccacaagccttggagatgatcatttgaatgtatgcattcgtaggtccatgttcattcgcacacatatgcatgtattttcattttaagaaaaatctgttttttttaattttaaagattttatttatttattatgtatacaacgtactgcttccatgtatatctgcacaccggaagagggcaccagatctcataacagatggttgtgagccaccatgtggttgctgggaattgaactcaggacctctggaagagcagtcagtgctcttaacctctgagccatctctccagccccgaaaaatttgtttttatacaaataaaaacaccaatgttaccagtgttagcatgacagcctggaccctgccagcccccaacaaaccagtgtctgccactcatcctcagcaggctaactaaaaagacatagtgatggcgggaagaagaaaaagcaatgtatccaatgtggccgcattaaaaagaggaactatcccactttttaattggattatttggtgttttggaaactagcttcttaagatatacctggtcccccggagaagggaaaagggacaagatctcctgagcaaattgggagcatggggggaggggagagggaactagaagaatgagaaggggagaagaggaggggagaggaggacatgagggagcaggaaggttgtttaggggaagaatagaggagagcaagataagagatatcataatagagggaaccattacaggtttaaagagaaatcaggaactagggaaatgtccagagatctacaaggttgacacaaactaaccattaagcaacagaggagaggctaccttaaatggcctcccctgataatgagattgatgactgacttatatgccatcctagagccttcatccagtgtcaggggccatggcaaaagtaaccttggaccttgtaagagacttggacagaagctgccagcataacccattatgattaaaagaatagctgccttcaatcctttcctccctgatacataatatttgggctcataaagtagcttatagaaggaaagatacatttcatggtcaggttacctagcaacccttcccctcttctaacccattatctaaaacctgcatgtaccctgtgaccttggtaacctcctgcacgctcaaggactcacacacagggacattcctcagcctggttatcaggcaagtagcctcaaacgacctctcccttcctgccaagctccccgcttggcacccctatataaggtccctgtgaaaaataaaaatttgcggcttgatcagaaacctgtcttgctgttgttccttgttcttcctgaccctatcattctaggttctttggtgactgcagcacatcggggtgtgagcttgcgtggcaccacgcaggtcggggcaatccagcagctgatggaagtagaagcagatacccacagctaaacactgaactgaattgaaatccagttgtagagaaggaggagtgatgagcaaaggggtcaagaccaggctggagaaacccacagaaacagctgacctgaacaagggggagctcttggccctcagactgatcactgggaaaccagcatgaaactgatccagaccccatgaatgtggatgtcagtgaggaggcctcagaaatctatggggcctcttgtggtagatcagtacttatccttagcacaggaatagattttgggagcccatatcatatagaaggatactcccttagcctagacacacaggggagggcctaggctctaccccaaaggatatgacagactctgaaaaccaccccccccccccgcgccgaaaacctcactttccctggggagcagaaataatatgggataggtagggtgttagtggggggcaggggaggagaggagggagagggaactgggattgacatgtaaaataatcttgtttctaatttaaataaaaaatggagggaaaaaaaaagaggaactatcttgaaggcctgcggtgggtgttgacgccatgtgatttctgcccagtgctctgaatgtcaaagtgaagaaattcaatgaagcatgggtaaacggtgggagtaactatgactctcttaaaaagaggaactagggggcctgtgaacccccactccaccttcactgctaacaaggggtcaggtttaaatgaaaggcaggacgtgggcagaagcaagcagccttcatcagtgctctgctctcctctcttccaggatgctctgacgagctgtcagcactgtgcgaagtctcctttgaagagacagatcccccactgtctggcaccaggcctcattgctttccttctctgagaatgagattcctggggaaatttcagtttttgtatcccttgtattgatagtatgataggcaaaaggaggagtgtcagggcttcttgtataatatgtccattcctgctaggggggctacactgagcactgatcattgttattgagggtacctcttcttccatcaaatgggcctatgttgtaacatcctattgtattttagtgtcctggtaccttacttattatagaaccaaaactcaaaagaaggaagtcggtcccactaatgcatatctgtgatcctgacacccaggaggcaaagataggagggtggtatgggtatgttcaaggccagtttggattacatagtgagttctggaacagtcttatataataagactgtagttggttttttgtaactctttggttcttctggcctaccacccagctcccaagtaacacacacacacacacacacacacacagagagagagagagagagagagagagagagagagagagagagagagagagagagagagagagggagagagagagagagagagagagagagagagagagagagagagagagagagagagatagagagagagagagaggagagagagacttattcctacttatgaatgcctggtcttatcgtgacttgtttcttgccagcttttcttaaattattcccatatacattttgcctctggacttttttttttcttaagatttatttatttattatgcatacagtgttctgtctgcatatattcctgcaggtcagaagagggcaccaggtctcattacagatggttgtgagccaccatgtggttgctgggaattgaactcaggacctctggaagagcagcaattgctcttaacctctgagacatcgctctagccctgcctctgggcttttaccattctccatttctatatatcttttctttccttcttattccatgtttggctgtgtctggctccttcttttcttgcaccttgatctttcctcccagatttctcctcctatttattctttttgtctgccagccctacctatccttcctcctgccttgctattggctgttcagctctttattagaccaatcaggtgttttagacaggcaaagtaacacagcttcacagttaaataaatgcaacatagaagaatgcaacacaccggtcggtggtggctcatgtctttaatcccagcactcgggagccagaggcagaggcaggtggatctctgtgggttcaaggccagcctggtctacaagagctagttccaggacagcctccaaagccacagagaaaccctgttttggggaaaaaaagaatgcaacacacctttgcatcattaaaacaaatgttctacagcataaacaaatgtaatacatcttaaaataatactctacaacataagactgtcaaaaaaacatagaggaaggggtagaagatggaggaagagaggagaagaggaaagggggaaattcagaaaactactgggacaaaaacaataaagaaaaggaaccctgattatcgcaaaaaattatataaattgctacttactgatatgttgcatctaggcctaaaagtacctagtcaacaaggatgctatctatactgtgacacttgctacatggaatcatggaacaagctcttggaatagattagacattatttgaatgaggctaaattgaaatcagtttttgtttttgttttttgttttccttttaatttatttagctaatgagaaaacagctcctttaagaaatgaacaaatcagaaggaataaaagcagaaccgaaaggaagtcttcctggggatatttcccaacatgcctaaggtttcatttcttctctcccttaggtgaattcttggaaacagaagcacgtgttcagcacactgctgttgtgaagaagagatgaacattgagacctgacactacaagctgcactcactgtcagctgaggacccagcactggttggttctgggaggcagaagaaggcttccctggctaacttttatgaagctgcttgtttgtttgtctctgacctttggcatctgtgttccagttcttatctgtgggagacgataagccatttattaagggactttgaatcctgctgcaatcctgccaactactttgcctggtggtttcgtgtgagctcagggtttcattgcttatggctttggttatccacatccccagagaaaatggaccactgataagcaggaaattattttacatcagaatgacatgaatgcaagtggtaaagaaataaacagattaaatgcaatttcatgcctgcttctgggcctattatgaccacattacctctgacatatttatgaagctatctgtacttcttaatggatggaaagaggtgaataagtctttacattctgtgttctcttctggcttccctgacttttaaacaagtggctcgtgtgggaggagtggtggtggccagaactccttgaatagctctctgggcatttttttcctgaaaaaccttgatgctcattgacaattactttgctactttaataacagcagtgatactagttttaaaacaactattattatttttgagcacctcccacatacttaggcattttgtcttcattaccttcacagcagtaatggaagccagatagtattattcattttccagtgttgttatgtaatgtgtggtaatataattaatgtggattaattacttttcttaatattttgacagttccttgagggaactttacccgctttctttgagtgtgtgtgtgtgtgtgtgtgtgtgtgtgtgtgtgtgtgtgtgtgtatgtgtgtgtgtgttttataattattattttttattgaaaatattttttcatctaatgtattttgatcatggcttcctcttccccaactccgcccagatctcccatccacctccatattcacccaatttcatgtcatctttctctctcaggattattttaaaaatcagggtctcaccacatagtctagctggaactcactatctagaccaggttgaccttcaaatcacagagatctacctacctctgcttcccaagtgctggtattaaataattaaataaaaatatgtgtacaccaccatatccagcatgagtgttttcatacaaagtgaaccctatctacctcatcacaaagtaatacgatcacagtgaatacattctttaccagttttcaagccagctttaacatctcataggtgtcctgtgggacaggatgcacacagcatccttatataggcaggagtaagcctgattcacatgtatggcctatgcccccagatcgttagacactggcgttaaaaacaaaacaatgaaaagtcaatacaatcaaacctatataagttgccttagagaatgtgtgggggtctcactttggttcttttttagtgtgtcagaaatacaccattacctggcaatgagagatggaggaaaattgcttcaactgttttctgagaagattattcatgctttcaaccaaaccaaagtcctaagcaaagcagaggtagagttgggacctgagtgaccatgcctggctccccctagccaactgcatgtgttacataccttgatcctccagactagcaccctgctagttctagactaagtcagaatatgttagtgtttaatcatacatatgagtcattgaggaaaaatattggccaaagtcctatagagttcacactgtgtgaggcagtatatttttcacatggcatattatggcctgccacatacagatatggtagttagggccccagagaatccaagataactccaatcaatgttcatttatctcagaatcctttctacagaagactcaaactgatgggcatttggttggtcatgaggaatgcccccagagatgccctgtctgctagtaaaatctatatgatgaccaaatgtttgtcagagggtttcctagtaagtaagaaagccaggcaagagggtgggggtgggggcagaacagaaagaaccaaatgtttaaaggcaaaggttacaccagactggggccaggcctcccatcttgtccacaagaagcgatcaggtgaatttttaagctagaacatttttcctctggaaacttcctgttctgtttgtgatgactaagctggataagcactgaagtacttcccctagtatctacgccctcgacctcccaccaccatcaccacaggaccctgaatcgacatcgaagagcaaacacagtcctgagtcctgaaatgcctttactcttacttaacattcacagtaggaagtgatcatctttctgaaatatgatgccaagtgactttcctttattcattgtgaaggaatagaagtgatgttaaggtaaaccacagataaagaaaagaaaaaggcatggaatgggggcggggattccaggtaggcaggaagacttcgatgtcattttgtgccttatttgtatggaaaagagtgtacttattgttttgtttttgggacaggctcctgctatgtagtgcaggctgaccttgaacttgctatcctcctacctccacatccaagggctgggattacaggtgtgttccaccacagtgggctcattcggtggtttgcttgtgtttcttacaaaatagatgctgtcagcaaggctaagcccatccgatacttataatttagtgcacttaggtgaattgttttttagtgagatccagtgcttgatttgctgaaccggatcactagaatgttacataagaagcccacaactggttagagacagaggcaaagtctgcgctcgctctctttacctctcctgagtcaccctgcagatgactcttctattatcttgttgacatttgttgacatttaccaaataataagagtgtgctctggcttggaagagaggagagaaaggggagagagagaggacctgttttgagactgatatcagtaagggcaaatgaacccacggggagccccaatggtgagtccaaatgtacaaaaagggccacactgcaaatctccatttctgcaacccttatagatctggctggcagcttccaaactaggtttgcttagtttgctacttcactcatgttgactttaagcacttttggttttagtatctttggtccatgagagaaaaacaggctggaaaagaaggcctggagactctggttgaagcatacctttgggaaattagtgatttcatttcatgtttcttatgcagcatgtctagcccagaagactcagagatgaataacatggtctgtgctcatagtccaacagaggaagttttaatcatgcaattacaatactgaatattctattctacgatccaaccatgtttaaagtgcagtgatgaaatagaaaagagagtataatcctactggactagcaagaaaggtttcacagaaaagatctttcatgagctaaaggaatcagatagcatgaattaaaaagggagaaagaaggaaagaaaaatggaaggaggaagtaaggcaagcaggctggagagatggctcagtggttgagtgtttgctgtttttgcagaggacccaagttcagttcttggcacccacattgggcagctcacaactgcttataactatagcccccgaggctccctgaaagaacctgtgtgcatacatgcttacatgctcatgcattttttaaaatgaaggaagatacacaggctgttgctgcaaacagacttattaagataaacattttttttctaaaaccatcttctcacattgatccccatccagagatgtattaccacttattgagcacctactatgtgctgctctgagtggcaaaaggttaagttagagtatatgcttatctgggggcagtcacaacatcatgtagctactcccaaactgagtggcagcttcaaatcatctggcaaactaataggcaagagtgccaggaaccaagtcacaaaaccattctgcccaggcaacactagggctggtaagggagataaaaaacaaaaaacaaaaaaaccaaacacttgtatagtgaaacaagaataggctagcagatgactagggatgacattaggtggtagatatggacccaggagcatgaggaaggttttgaagtgaaatgcattgtggtgtgagttgagttttgaagattaactacagagtcttagctggacagataatatacagtcaagaaatagtccagtctttctatctaaaagaggctgggcaaacatgtttctgatagttctagcttcctcacctcctatcctactcacaacaatgcccctgacatcccaaattgctcttggtgtcaccatgctgatcttgctgttcctatccagcactttgagcttatagttgtcttcccatttgtagaagtggccttcctctatcctttcaacaaaactacagtcgaattctttaagtcaagggtcagagaactctgtgtctgcaggccaattctggtcatagcatttttaaaggtcaagttttactggaacgtggccgtacctgttcctttatgtatcacctgtgacttcattcaaagccaagatgagtagtttcagagatgctgtggcctccaaagctgtgtccctgagataatggtatttaacgctatgtgctcctgttttctcagcagtcatatggcaatcatttgcagcatgtcttaaagtggcagatgaagtccattgtgtttggtggctgctgtggggtgctagcctgattattcttatttgcctagctggaggataatgcttatcagtcagccttctgccatgttgaaagagagattcactgaagtttgtgatttttcctgggttgccccactagtgactgagcaccttgggaatgtgtaaagatttggtttcctaaccctcaactcaggttgcttctgaaaagctatcttcagcatcttggttccatatggttatggctttccctgaatcttttctacctcttcctcgtcccctccaacaagagtcaaatccaagaacacttgctaataagtatcctgaacaccaagctcattctcagggtcacacccaatgatcctacctatgacagcaggcaccaggattagtctgtgagtgcagacactgagtggcatctcagaactgataggtggactagagcgagcacggggcagctatgcaaatgttgtaaccagtgttgacctgggatgtatgttcatgaaaggaaaggcaccaaggtatacatttgagaaaaggtagctatataaatcacaaggacagtggaatggcagctattctgttccacagatgctctggggaaagggttcagagctatctcctttataacacatcactttcccaaccaccaagtcaagaaatagtagttaaataataaaacaattctcccccaaatatactggggttggtaaaagaggaaaaagaatgatattccctcttgtcttgtttcaagactaagtaatagggaatatgcctaaggctggattccaagggacccaaccaaggtgagggaaagataaatttggataagagagtgacaaaatgagtgtactctcccatgacacaggatgtaacaatgccctgacaggaacttcgaagaggtgtgagcatgcactcatgagcatggagagaggtgtgaatatgtgttcatgagcatggagagaggtgtgaatatgtgttcatgagcatggagagaggtgtgaatatgtgttcatgagcatggagagaggtgtgaatatgtgttcatgagcatggagagaggtgtgaatatgtgttcatgagcatggagagaggtgtgaatatgtgttcatgagcatggagagaggtgtgaatatgtgttcatgagcatggagagaggtgtgaatatgtgttcatgagcatggagagaggtgtgaatatgtgttcatgagcatggagagaggtgtgaatatgtgttcatgagcatggagagaggtgtgaatatgtgttcatgagcatggagagaggtgtgaatatgtgttcatgagcatggagagaggtgtgaatatgtgttcatgagcatggagagaggtgtgaatatgtgttcatgagcatggagagaggtgtgaatatgtgttcatgagcatggagagaggtgtgaatatgtgctcatgaacatggtaagaggtgtgctcgtgctgaggtggaaataattggtagttgacaggtagggctgtgcaatgaacacagggaagattatgtttgccctttcccattttgtcaatgactggcaagtgcagcattcctacctgacacttgctgttgtaacattctgaagagttttaagccggtcaagtgaaaactgccacagaatccagaaacaaggagaggttcccagcctactgagggtgtcctggtgttctggaccctccaggagtaacagttcttagttacttcacctttcactattccaactccaacaggaacaatatccctatacaaacggtggtgtccagagtttgcattcactttggaggcctggtaaatgctgagtgaggtctatacccgatcaggtgatcaaacctatcatcagcaagaacaaagggcaagagaggaggcaaatgagtgtgtcatgctgatcgacaactcctggagaactatgtctctccgataacaagaagcagtttttgcctaggaaacaatctgtgcgcattctgttcctggctcagtctgtattttatactgatttataggttccagcattgcagctatgtcattgcacagattccccttccaaagatcaggagaacaattttgatatggcgtggacttctcttatctgtgtgaacttactcttggtattatctgagtatatttgttcttaaaccgagtgacctcaggccatggagcaattatcatccaatcatttcttttaaactccaaggtagtccttcatcctgatttctcctgggcagaatagatgctcacttgagttacaacagaaggaaaaccagaaaagcaccctcaatacactaactggattcctttcagtatagtaaaggatgctggggattccacattaataataccagaactggggagggagaggcaggcagatctctgtgagtttgaggccagcctggtctacagagcaagttccaggacaggttccaaagcaatgcagagaaaccctgtctcaaaaaaccacaaaccaaaccaaaccaaaccaaaaaccactgctgtaacagtgtgaatgggtccaaagtagtcacattgtgcaaagcagtgctgctttattgcattgttcagggtgtgtctgccagagcctgctgtgaggactgaggtgactgtataatcctattttaagaggatttgtgctctcactggagtgtgctaacatcaaatttaaatattcagtaattgttcataacatgttagataccatgcccaacctgttggcaatcatgaaacttaattgtataattctgaagactctcaagaaattttctgagctccaggaatgcacttggttgttgctacgttagggtaaagtatacacacttcttctagagcagtggttatcaaccttcctaatgctgtgaccctttaacacagctccagatgttgacccccagccataaaataatttttgttactacttcataactgtaattttgctactgctatggaatcataatgtaagtattcttggagatagaggcttgccaaaggggtcaagacctacaggttgagaattgatgctctataacatcatggaggagagactgtatgaggcacagctgctcacctcatggaaactgaaagggggaaggagaaggataaaggaaaagagggagggagggagggagggaagagattttctttaaagatatgccttcagtgactcccaatcaactatgagcccatcagtggattagcctccctcatgatccagtcatctcattggctccaccagctggcaaccaagccctcagcaagccagtctttaggtggggtacttcatatctggaaccactcaaactcacctcatattccacaagtcactcacatacaaactggtacaaattggaatgcagttttgaaatgcaacttttagctcagtggaagacacaaagcaaaatcaaaactaacaaattaaagggccatcacctaaagaacagagttctctgccctggaaaactgatagcagaccatttccaagaatatgagagaaagaatcataatagctgaggctggaatctaattaaaaatccctttctaacctgttgatcattttcaactccatcattctgtaagatgggacggtccttctcacagctcaaagatcattaaaccattcctactgggtagctgaggatcgtctccttgacaaagctttctcagtgttgacgtatggacaactgctcatggcagggctgtccttcacccgagagcattcttaacagcatatctggcctctggcctccagatgctaattccagttcccacttgtgacaataaaaggtatttccagacactgccaagtgtcctctggggagcagattcactcttgattggagctactgcttcagctctatctccatctatgcaaccactctcctaagataaaactcagtaaggaattcatttaatatttatactataagcattaaaaactcatcacagtacttggtgggtcttaaaaacatctattgtgtatctacagcatgccaagcactgcattaagttctgtggcccaaggagaaaggaacaaatcttgcacacagttcttcttagttccccataaccctgtctgtttcagtgttgctttgggagctttctaagtgggaaaaccatgatggttttattcccaacgtccagtagaatgcctagaaaatagaaaaatgtttgctgatgaaatccatgcaaaggtaaacgatcgagaagtgatgggaagtggaagagcacacaacaatgacagtaagttgaccacatttagttgactgagggaaaagttgaatctaataataaagttctcattgcatcttgtcttatcgttctatgaattcgacagtgtacggcttctatgggcacattccctcatgttaacacatccgagcatatctagacctatggaccatatatagcctgctgttcttccactttaccttatggttaacagggaaaaaatttcaatgatcagaaatgatcagagtagaggtttctgatgcagctcgttcaaatcatgcattttggtgtaactactcagctaagtgcaagtttactggatttttatatgtagtttaaatatagtgagaaaaagaggtaaagatggatgataaatgtaaatttatatttttatactatatgtttcagggcattaagtatttctttacagacatatgacactgaggaatattgctgttaccagaagacgatgattataaaatctcagggctgggcacatgtccctccccatgagtcattagtcagggagttcccagaggcacctaaaacaacatgggctgtgtatttgctcttggttgtctgtgataattagaaggtaagacaatgttactgaagacatcatacattttgattgcaggatactgagaaatcaatcttgaatttgccagaaaactctcttgcctctggttagctttttagtgctagaagctgctactcaggcttctgggagagaaaatacaacaatgttcttatccagcgatgggccctgcatactagaaagccaattttgcaggcaagatgtgcccactagtgcaatcgtggcaaatctcagccactcacttggttggatgaggagagatattgtgcctggtactctacacccagccaaaacctaagaaagtcataagccctaggggagaaaccattgatgttgttttctaaatgactgtgttgtcaaactgcctgaaatcttagtgtttatgtctgtgaacttgtgctgctcccaatgttcgtcaaagaagtctcttattgcagtgagcatcgatcagtgactgtccaaagggctgagaatgaacaggaatccgagtgctcaccacagatgggccattgacaccacctgttcccccaggagcatcatgataaacaatggggtggaaaggatgtcaaagccagaggacaggaagaaggccatgaaattctgtcctttgaacatgacatgactgttgcacatatgaatccacaatagctgtggttgcctggacaatatcaaaccaattaaaaattccagaaaaggaagacaaagctgtgaatgagatggaaaaggggatcatagagggacttggaggaatggtgtagggatggatatgatcaaggtactacatacatgtaagaaattttcaaagaatgaataaaaatataacaataatgacaaaaagcaaaacggagaaaaaggaaataatcacattacaatttctgtacacagaaagcagtgtaactcaccaaaggaaagcacatggcaaaggaaagagaagttctttacaacacagggatgtcagggtctgcatctaagccaccacgaataacctgtgtatctatgcctgagatacaaagggacagaggtgtctatatgacctttaggagtcatttcactcagtacttttgacttcttcttcagagattccctcataatcttatttattacataaaacacagcacatggcattatactttgtagacagaaaatttgatttgttgagggataagaagaaagtcaaaactattttgtgtactttaagtgttctatcatactttgtcagcatttctgctcattttatttatgattgtgtgcagctagtaagccaaaaactttgagcaaagacacctgcacccataataccctattaaatgtttgctggaactgggcattggtggcacacgccgttaatcccagcactcaggaggcagaggcagaggatctctgtgaattcaagaccagcctggtctacaagagctagttccaggacagcctccaaagccacagagaaaccctgtctcgaaaaaccaaaaaaaaaaaaaaatgtttgctggttttggtacccaacatccattcaccatcagaacatagtatccttgtttgtctggggtaaagctccctctttgccttcagcccctggcaactgcaactgagaactgagacatgtaatcaggtcacagtatcaccattcacattgtcccgctgataaagaatttattttatttttttagactgaatatgtagtccaattgaagcaagcagtgtgatggctaaaataaagacacatgcagaaacctacacagacatatataagcaatacacataggcacatatgaacacacatgtgcaaatatgcactcacatatatatatatatatatatatatatatatatatatatatatatacatatacataaacacacacacacacacacacaacacctttgaattttgagaagtcagttgactaattcttttctccttaacttgaactggacagactataaagtctggtgctgaggctgccattttgaatatacaaggaaaaaagaggtctgaaattggtaacgttgcggctgagaaatggggagagatgaagcaagaaaagagaagcaaatgaagaggcacgtggaatgtataaatatggcgtttaaaatggtttagggtttttcatggcaaagagacacaactgctcctggcaacaccaattacatcagaaaggaggatgggcatcaaagaaaatcgatatggagttgctttcaatatggtgagactaggcatttggctagctcttgcctggactgttggactgtatgttgtataaaccagtcatgcaggatccacaggaaagtgactgctgaattttccaaaacaatatgggacagtcctgcagggttcctgcttcatagaagagtctgccagacattctgcaggacacagagaaaaatgactgacaaactgccaatgcaggtggacagtttaaaatttcctgcttcaccgagaagtcttccagatacactaggtctatggaccaaacatggatgttccgtcattacagagaaactttaggtgactgtccaggcatcaagttgtctctgtcaattctagagtttatatattatccttctgaggtctttgatggagttgaagacagacagtcatggttatggttttccttagttatgacaacagatgaattatatataaaattgtagactcataaagataggatagatagtaggatattttctttaaattttgccaaatgttaatgcattaaatattgttagctatagttcttacttgataaccattttgttatatataattttactatgttaaaggtaaaacccttctcattaggcagaaaagaggaaatgatgggagatgttcttctggatatatgtttctcttattggttgatgaataaaacactgtttggtgaatagaggcaggaagataggctgggcaaggagatgagaattctgggaaaggtaggtagagggagcccaccaagggagatgcaatgtgagacctggaagataatatgcatcaggcattctctggtaagataagaccatgtggaaatacttagattaatagaaatgggttaataattaagtcagagctagccaataggaagccctagccattggccaacagtttaataattaatctagcatttgtgttcttacttgggacagagaagggtggtgggatctggcaggacaagaaaatttccagcaacagacaaggagagggatggggcaggggcacgagaacagagacagacaggcagaaggagaccagtatagagtgaaagacagaggcagagctgcagatatggattggagctgcaccagaacgggatggccagcatgcagtgtgacagtgggtgccctggctgtcagccagtgtagtcccatctccatgtggccttcagagtttgggctcattttctgagactttcagttagatgtgcctccagttactttcccaggagtattatgagcactgtggctctttacatgttccagaggaaaaatgaagccctgatttggagttccagtgtagctaaaatcgcattagttcgcccacaatttacggagcctttcccctattatgcctcactccacagttctgaaaacacctaccagatttaaaaatgcaacatccaaaatttcctttcagaaaagttttccccttgccattaagattagattaatacaaccaatgacttttagtttcatgtggaagagtcatctataggtgatattaaaaatcaaacgtgtagaaatatcccaagaagccttgaaattcatttatagtcatccagggttagcttaatttaatgttttaaaaaagttattactattacatagtaaaattatatataacaaaatggttatcaagtaagaactatagctaacaatatttaatgcattaacatttggcaaaatgtaatattattattgtgagaattcttccgatcctttcttctttaacaaaaccatcatgttgttggttggtcttcatgttccttatcaatatcctaccttcctatgccgaggggacactgaaccacagcttctactgcaacagcagtgtctggctttctgctaggctagggaccaaattcagtatggtttctaagactgtgaagttcagatgcatgcatgaactattcatgcatgcatcatgttgactattacagcatgttgactattacagctctttagctggctgagcaacttctactttggaactagttgatgtatgtggttgagctggttaatgctcgagtctaactgaccactctgctgtctcaaaacttagtgccaaaaagtgtttgcattgtgacgagattagctgtcagtgtgatgcattcttccattttaagtgtatgtattcttctattgtaaggcaggaagattcacagctagtctttcaaaatgtgagaagccatgctagttgcttccctgacttacttcagtgttcagaatgctgagaaggactatccaatgaattcagatgttccctaagatgattctaacatttcacatggctttgataaaatcttccaaccagagatagattgcaaaggtcaaataagatattggctctgcttttcatctgaattgattgcacaaattcaacatgatattggacagtttatgctagcagaagttctgaatgggaaaaaccacatacttaaccaatgtgttgaatgtctatttttatctattttatattaccttctttgatagacaacatgttcttgaaatgtaatgtctgatccagaaaaaaaggagaatgggggttccaggaaggaagaagtgtgtggagccagtggcaatgtgtgacctctagtcttgcaggtacagaccccacctgcctagcacagggaatgactttcccaagcagtactgaccagtagctgagctgggatggggatccaaagggactatttattgtttgtcccttggtaatggaaacacatagccttgttggaatgcaagcatgaacaaagtgacccagagtcgtgacatttacctcaagcttgatgtcacattgggaaaggcataagcagaacttggccaagctgtcccctgagcctcaccaacaatgaactggccaggagacccctgtttattgagtctctaaagccctccagcctggaaaaagatcccctctacttggggtgaaatacgtttgaatcacaacacatagccatttctatacatcacattgcccgtctccaaactttaggtagcttttcctctagtctaattttctctttcatgaacctaaactggttgtcttctcttttctgagaaagggatgagggtggtgatgcagaggggacatctaggtagtgaggtggtaggtgttttcttttatgctcaactcttaaaaaaatgcataccactccaacttgacaaaagaaacaaagcatctccttaaaacatcagacttctttaaaatgttaaaaaaattacatctctacattgttatcaatatgccacttcaacactagtcttaagtgcctgatagggtcattttgctcatgtcacttagaatttggcatggggcatttctgatattacgacatcctccagttgtgctagagcaatgctatggtgacactaagaaagccattttccttctggagatggcacagacaaggaaggctagtgggcattccacatggacagggcagttcctgggacacacaggttcttacttagcctggtcctcagggtagggaggcccagtaaaggcttcctggacaatatcgttaggtatttgtactactgtcacacaaaaatcaacaaggtgaagattggaccacccctctcctagcagtaaccaagcaagtgagatacagacttatctactgtcagacaaagtaatgggggaagggctcaggataggtaaacccatgctctcacttcaaaactggaaaatcacaagcatttgattcgctcctcatcaacgcttcccactcagaagaatacagttttaaaaggaatccatttatcccacctcaaattttttggtgtatctttttcccccttaaagcataatgagcttgtcagagtttccatggtgaccacagggtgccatggaaactgatagatttagctacactaaaagaataaataaaataggcaggcatttacttgactgcagtgacaaccctcctagatgagagaagggatgcagctaacatttaacctgcttgctcttctcagtctgcacctcatggaaacatgaattattcttcctggacactctactgacctgtgctgactggattctgttctcttcaagactcactgttcacacgttggtttcccttccagctagcaggctgtgtgtcaccagtaactgttagaaatgcaacacagtgtgaagcctggaggtgttacaacatacaacagtgaccaaggggacttctgctggaccgaatgtgcaatcccacagtcgactacagcaagtctgtgagagtcaagacctatatccattctgtgctacctggatagggacccccagattcctctgtaaaatgttcaaacccaactgtcttgttacttcacagggttgctgtgagaccaaaatggggtaaggcaagcctttgtaaacagccaggctctagctcacaggagggagctgcagggataatcacatagccagatgtcataattgatgatgcttcaatataggactttgccttgacaatttaaaggtttagaacacacttaagccaactttttgaggatttgggggcaacatctgactccatgtaaattagggagaattgtgatcctgagaagtgaagtgtttgatttttttttattatgaaacactgaaaaaaatagaataaatgaaacacaggtgtgccttaggtggtagtcctgatgagttgctcaccattaacctgagctcactactttgcctgttagcgtttgatcatcacagcctgggcaacagagctatctttagctagtcagtattcacatatttaaccctctgagcactgcatattgaccacaaactatccaaaggagatcaatggacaggaaggaagggaagagatatggtccttgtcttctgaagatactgaggaaggaagagcagcatcccaaaggaacacttaatatctgagagagaagagggatacagatgcctgggatgagtagggtggggcacttgactcaaatgaagggtttggaagtggggagtcatgagaaatgcggcatgatgccagctggcaaaggggagcagggcagatccatgacctgtggcagagggaaggggaatgattccaacaaaatgaccagtggctacaccagaattattccctaacaatgcaaaggtctttttattttttgtttttttgttttttcctgatgaaagaaagtgaaatgtggggctgtcttagttagtttctatttctgtaataaagcacaacaaaaagcaatttgaggaatatagggtttatttcagtttatagttccacatgacagtctactagcaaggaaagtcggggcaggagcctggagtcaggaactgaagatgaagctgtggaggaacactgcttactggcttgctcttcatggcttgctcagtttgctttcttatacatcccaagtgttcatggatggcatcactcatagtgggctgggccctcctacaccaacctttgacagaaaacaaaagcttttcatacagaccaatatggtgagggcatttttctcaattgaggttattgcttcccaaaatgactctagcctgtgtcaaattagcataaaagcagcctccacaggcccctagaccctggggatgcttagactatgttctgaaggcaagtagaatatttttgtactccttccttcctccaaacctcagtatcctggagacaccagaatgagatccaaaattgcagggagcccccaagtctgagggtggagagtcagaaatgagtggggagatcatggcttctggctggctcttgggtttctgcatcctgagcctgtgtgccaacaacttgcctgagaatagaacggaaccacgcacagctcaaaggagctaacacttagctcgtcttgtaggatgctaactcatgtcacccagggacccatgccattcctctgctaagattcaccatatatagggctacctaatgtttattcatcctatgaagcacatagtaacagcatgagtgagcatcaaaacaaaattctatattgattccattatctaagcagaatgattgccattgttctgatgttcctttccaattctacatgctcagagcctttcatgacttgaattatagcacagatagcattttataagtttaacatggcgttatgcttcacttgtggttacatttttacctattatattaacaactgtataatacattgtatttagactggtcttgagctgaggactttaagggatcctcttctcttggcaccccagtagctgggattgcaggcttgagtctttgtgcctgggtacactgtatattgtgtattaagtcacaaatctagtcttaactgttggaactgaagattcttccagtgaaaaactgattaactgttgagttggaaacattaatccctctttcaagctaaatctggacattttcagnnnnnnnnnnnnnnnnnnnnnnnnnnnnnnnnnnnnnnnnnnnnnnnnnnnnnnnnnnnnnnnnnnnnnnnnnnnnnnnnnnnnnnnnnnnnnnnnnnnnnnnnnnnnnnnnnnnnnnnnnnnnnnnnnnnnnnnnnnnnnnnnnnnnnnnnnnnnnnnnnnnnnnnnnnnnnnnnnnnnnnnnnnnnnnnnnngaggtttgtatttacccaaacttagggtgacataatatttccagtgtactagatattggaactcaaggaggactggtggcttgcagtgtcatggtgacatggctgatgtctccaagaagtacgcataaggagtgctgtggtcaacctggagggttctgaattctcagtcagcttcagaggggtgtaggctctgaagaggaggtgtgagaagaaggggacagaagtacatctgagggtttggcagctctttctcccaaccagagacacatttagatagcatattgatgacataacccatttggtaagcatcaggtcatttcatctatgattccaagaaagagtggtttcatctaacagagccccagatcctcttttcatttcctcattaaaagtccagggtgaaaaagtaaattacagaacagttttatctgaaacaacatcttcagacagtgtctgtcaaatccagaaagtttaagtttcttaaagcataggcctacttttacagtcagtgtgttagacagtctgaaactttctttttaccttcaccaagttacatttaatgtctttgaaaatgtaagcattacaaagtgtcttataataagcatttaatagactgattataacattttcctgttccttaatttcacaataggggcctgttcgtttcatatgcacccagaaaggaagattctggtactgaattcttttgtccatcaactcacaccattcttattccctctataaaggctctagtatagagaaacagtacctccaagtcaggaagatgggcacctgagtccttgcctcttggagcagctaataccctgctatccatcttatatgctacatgccctaggtaaaggagctttacagtggggacaggtttatggggacccacgggcctgtggtgacatttctgatctaattatcctcatcagctccatagaagaggacatagttgtgacatcttgtatccaaaatttagcaagaactttctcagaatctaccctacaagcaccacaatccttggcatgtaagggagactcttgcttctgtgacttttctttcaggccatgaccctgtcctcagagtttcctggaacatgaatatatttccccaggggctgtgtaagcacaaacctccccatcatgcaaacaactgctcctgaaagtgaaagcaaaagactgtcggttattattttttttttcagaggattgcaaacaactgctcctaaaactggaagtatgctggccacttcactgaatccctcagtgaagtttcactggatttttgtcaaacagcatcctctgcctctgctgtcccttgtgctgtggcctgcaccagagtcactggcaggtgaccaatcatctccatgtgcctgagactgagagttttttcaaatcttaagactttaggagatgaaaccagggaaggtcagtgtaaactgggatgaactggcaactgtagaccttagactgtaatctctccttagtgaagaggaagtgaagggactgagaagggaacacatggataatttgtatgtcatgagaagctcacttcaatgaaaaccagctcaggtactgcaatgagctctcaccctttacatgggagtcagagtagatgagtgtcttcattggtgttctgcttacaggaaaaggaaattatacccattcatttaataaatacgcaaggaacactagtcatcgctcaagcattgaaaggtccctctgttcatctggcatttctgttatgtgtgtgaatggtagaaatggaaataaataacctctttttaagctgttgttcacggagtccaggagatctcataaaaacaaaaccaatgtaggctattgcattgttcctggctgcctcccagatctgaagttaagctcctgttgctaaaggcaccacacaggacacaagcattgaaggaattaagctggaattgacctggaagctttctctttgaagactggctctcatagtaccaagaagtgctgtgcaagctgccaactgagaaaattcagtcaacagtcttatatagctgtgatgcccacaaactacaacaatgatcagcatgacaagatataaacaaaagtgcaatagtgactcatattttggaggtatccaacaagtgtctaacaggacttaaggcccattcaataggagataattcaggtttgatactgtaaacctgcccaaatacccattgctggagaggccatgtgccatagaggaaaacctacaattgccactttactaaaccagtaaaaaatgtaactacattccaaatacttatctttgtatccacagataatcataactctcacttttcatcaaggaagcttcttcttgcaacagagaccattacagaaatccacaactgaccatagtacagaggacaactgtggggtgcccaccccaactgatatattcacaacacaacacttaacatcaatgactcagggagtgtgaaggagaggggatggaaagatttttaagagccagaggagcaaaatgtctgcttcaagatcatgtcttctgtattgcaggaaagttgcacccatgaggtctcagcaataaagtatgagacctgaacagtagcatcagtcgacaaagcaagcttggatgggggaaatagcacaaggcctctcctctagatgaggagctatgggcagttaatagaagctgagacggagagtcagtcttccccagggatgattaattagttatctagtaacaagtggtcatccctaaaaacatatacatataagcaaaactaaatggactcaacaagttgtattaacaatatatgtatgtagtatacaccacaagcaataataaagaaaaaagctaaaaagagagggtgtgagtgatctgggaggagttaagagagagaacatatacctgctcaaagtatattttatgcaattctcaaagaaatattgtattaacattaaaaagaaatggtaacaaatagaaaaatatgaaattcataaggatgcatatgaagactgaagaagcaggaaaaggatgaattagtggaacgagaacttcctggtaggggacacctaactcttgagcagggacagttacggcatggagctaccatttgaggcaaagccatgacaagagagcttccccattcagagttactagctggttgctgtggggagcagctgtgacaacctagtgttcacacccttaaggcaaataaatgtcctgcctgtagggcttactgtaagagcccggggctgtttcctgaggagggaactggggcaggttttgcagtgacttggcccgagtcctgttttcatgaaagagaaattgaggacctcagaatcatagcctcgcagatggtctctagagccccatccacgcacttgagctcacagccgctgtttagcttgggaacctcattgtctcctcttgaataactgaagaagtcaaacgagtaatctaccttaggcaaggaaagttggccttggtattatatgtgggtgggcacaaggactaaaatactgacctcaggggactagagggactttgggatccagattaacccttggtggtagggttcccttgtcaaacaggttttcagaaccccagcaaagactgaacacattctgcatcctggccaccaggtagatccctccaggcgacctttcactaatcaccgcatttgtgcaagttcagaacctggtgcccaagttgaggacgaatgatcctacgagtgtagaaggctcagagaagacgcttgggtgtgcaatgaaggcaaggtagagcagcttggcttcaataactcaaggagttaacgcatccaaaaccaacgcaggggtggggacgaaaaccacaccccacggtagtcggagccaactcgcaggagaaaaatcctattggcattgaggaggcagggagccagcccctgggcgcggcctgcagggggcaggcgaccgcccggggaagcgggggcaggacaagtgcccgagctcaagtagctcccgcttcgcagctgcagggaccgctctgcgccctcctgccccggtgcgccccttcttggtccgtgaactcgcgctgcccggccgctgccatgtgtgcggctcagacgccgccgctggcgcacatcttccgagggactttcgtccactccacttggacctgccccatggaggtgcttcgcgatcacctcctcggcgtgagcgacagcggcaaagtgagtgggcgcggggtcccgcgcactgcggacaggtggagggaccctggcgaggtgccggcgttccgggttcgctctgacacagagtgagcgccgtggctccggagttgaacttgagcgtttggctcttagggaatacaaacagcctggtcactaggttcataacctggctcgggtggaacgacgtcccagaggccaggagctatggattactagcggggcactgtaggaaccctcagaaaatgtggttgaatttcttgccacaaagctgacatgggggtgggaggtatcattggattagtgttgtttactgaattcagcaggtagagtaagcaaaaacacctggtctcattcacaggttcattcaacaaacaatgcatcaggctacacaagtttaatgctggaaaggatagaacagggaaacctctctctctctctctctctctctctctctctctctctctctctctctctctctctcacacacacacacacacacacacacacacacagatccatttgcatcaaaacaatcggtttcattttaatattcaaaatgccctctatgaatacaggttttatacaccaccatcagatctccacagtgttatatgacgtctgatgcctacttctttgttcacacagatagtaattacgtacattagcaaaggcctgggcagtttgataagtgaagtcatttcattttggggaaaaacacgggatattttgaattgtttcttaaagtataccagtttgtggtttgccaggttgaagactataggtgccactgagtcactgacagtattgaattataacttgtatagtcttaaaattgttaaacgtgtgtgtgtgtgtgtgtgtgtgtgtgtgtgtgtgtgtgtgtgtgtgtgtcaagtagaatgtgtggtcagagaacaactgatgggaattggttttctccttcctccatgtggattccagggactaaactcaggtcttcaggcttggtggcaagcacttttacctactaagccaccacacaggttcccaaaccttgttttctcacttgattttgttgttgttggtacattgggaggcatgatgttgtgtttccaaggtgataaaagtctcagagctcaccaaatggaggctccagtaaaccaggggacttgcacatccactctatgtataggggcgtgaacctcaatttcagtgaataactatctgatgtaagccccaagaaaccaaatacagaccctgggagactggtgaagaggaggaggtgctagttttatcacaagagctttgtgattgatagctttctttttagaaatcaccttctatctagttaattctaataaatagtgtaactgaagtggcaataggtttggggacatgatggaaataggtaagacaagggataagttatcagaaaaccaatcttttccttgagtttatgcaaaagaataggagtgtcctgaacatgcaattagtggttgagtcagagagcctattcgttcctcttggagcgtgccgagactctcagtttggagagtgtgccattcccacatgagacaaaattaactaggaatcagccacagaggtgagccagtcaagatttacagctgaaaatccccttgctggtggattgttaactattagtctcccacctgggtgcaaaacagtaagttacccctcccccagccttaaaaggatgtgggatgtattttagaatttgatttccctcatggtgaagtagggaaggcctcacatttggggttgctaagacagtctgtttatttatacattattatttaagcatttcaaggtatatgaaaacaagggtgtccttgaagtgagtaaattaatatttaggaacataggggttaggcatttctgatttgtagtgagctctctccccccactttttaaaaaaattaaattaggaacaagcttgttttacatatcaatccctgtttcctttccctccccttgtccccaatcctcacccatcccctttctgctccccagggagggtgaagccttccatggggatcttaaaaatctgtcatatcatttggagcaggacctaggccctcccccgtgcgtctaggctgagcgagtatccttctatgtggaatgggctcccaaagaccattcctatactagggataaatactgatccactaccaaaggccccatagattgcccaggcctcctgaccaacacccacattcagggcctctgggttggtcctataatggtttcccagttagttatcagtatggtgttcatgaactcccccttgttcaggtcaactgtttctgtgggtttctccagcctgatcttgacccctttgctcatcactcctccctctctgcaactggattcgaggagttcaactcagtgtttagctgtgggtgtctgcttctgcttcgatcagctattggatgaaggctctaggatggcatataaagtagtcatcaatctcattataggggaagggcatttaaggtggcctctccactactgctcacattgttagttggagacatccttgtagatctctggacatttccctagtgccagatttctctttaaacctataatggctccttctatgattgcatctctcttatcttgctctcctctattcttcccctgactcgatcttctgctctctcgtgtcctcctctcccctcttcttctccccttctctttctcctaaccccctctcccttcccccatgctcccaatttgctcaggagatcttgtccctttccccttctcctggagaccatgtatgtctctcttagagtccttgtttcctagcttctctggcggtgtagattgtaggctggtaatcctttgctccatgtctaaaatccatatatgagtgagtacataccatgtttgtctttctgtgatggggttatctcactcaggatggtttcttctagttccatccatttgcctgcaaatttcaagatgacattgttcccccccccactgagcagtactccgttgtgtaaatgtatcacattttctttatccagtcttccattgagggacatctaggttgcttccaggttctggctattacaaataatgctgctatgaacatagttgaacagatgtccttgttgtatgaatgtgtatcttttgggtatacgcctaagagtggaattgctgaatcttgtggtagactgattcccattttcctgaggaactaccatattgatttccaaagtggctgaatgagttttcacacttaaagctaatgtcaggacacagcttgggatggattggggttatatagaaggacttgtgaaaaatactggctctatgacagcatcctcagagaacccaaatgcatgggcccagagttggattcttacaggcatctttggagactggggtaaggcagtgggtgaatcacattctgagtgattcttgtggatctgttgtgtgaaatgtccaaagctcatctcacttcagacctaggtctggggcaacatctcagagaaaggacagctttccttgtcttcctaaatctaacctctcatttcctgtcacttgatttaggattagagaatagtaatgactgtgtttaactcatttaagtacaactctttaacaaatgagttaatttttaagagtacaaaacaaaaacatccctctgtagccaatattttggtattatttagaattcagggtgaatttttacacttaagcagcctgcagttgttttttttttttaaaatagattccaagatgtataattcattttcaagtgttttattaatcttgaaacacagtgtactcaaatattactattacccagttcttcccacatacatcagggtcaagttgtctctaaagaatcttcaaggttggaactttcagtgcacactttcacagaaaacagagtaagtgtgcctacctggaggtagtgccctgggtgttaggagcaaattctctgtagaaatgaagccctgggtcagagtgttcacatgttttgagaccataaaatgagacattgaatctctcccaagcttcagattcctcctttgtagactcggttttaaatcagacacagagtgagctgatgtgtgacaatgtctgcacttagttgatacagaactggaactgtgatcattctggccccttcctttcctctgaccctagtaagccctaagcctcttgctcagggtggcagttttgcgtctttctatgtggtggcacctgtgcagccaagtggtagaaaagaaaactgaggcctggagcaaaccttgtggaaagaggcacaattgctagacctcaactgtgcattttggtgattgtgtcagccactcatgcatcatgacacacaaagctgtccctgggaaaggtctcatgggccttagctgccagatcactaggacattattatcagtgttactcccactacagtgatgaggctggttagagaaactgtgcatccacaggtgtggcagctttcaaaacgtggaccaaaggccatgttctgtttcccccaacagtctatttccctaaggaacaaagattccttgaattttaaacttacactttaggggatagctcagtggttaaatgcctggctgctcttctagagttctcagatttgattctcaacacccacatggctggtcacaagcatctgtgtctctagttctagggaatctgaagccctcttctggccttcgagggtagctacactcattgcacacatacacatgcaaacacagacacacatactacatataattttagtcaaggcatcgaatttgtgataataaaagtggagtgagtcttgaatccaaaactgggctcatcactgaagatgaatgaagtatgaaaacagccttagtgaggccaataatctagtgagacatatcacacctgctgtgacttctcagaacagaactggtctgaatatatagggaaggttttctccagatgaacgcattgtgacatttaaataataatctgcagggtgaatggaaatccataggcaggttggattcagagaaaatcagtaccttttagatggaggaaatggcctgtgaaaaaagttctggggttagaaaggatgaaagacaaagataattagaaacccacagttaaggagaaggataacacaatgtaagacagcaggatggtagtgaccatgtagaactggacaaggaatcctcaaaagaaagaatgcacttcaagataaagaatggacaggagtgtggctaggccacaaagtgaagttggagattaccacagtggtttagctaaagcagaatgtttcatgaactcttaagaatgcctctgtcacccatatgaatctgaccaactcaacatttcaatttctaggttttcttatagtaaaataataccaatcattacctcatgaggtggtgggaagtattaaattattttacgagcataaactatatagaataatgcatgacagacaggttatccagggccagtatacaccagcagttattgctgtccctggaggaggatggatgtggacagaatggggagctagtcaggtcaagtcatctggattgcatggtggctgatttctagcttctggagcctagagttgatgggggaaatccttctgtgtatatgtttgtcttattggttgagaaataaaacactgttggataatagggaaacaagataggtagggctaggagttgaggaggattttgggaaatgtagtaaggaggagagttgccatgtgatcctggcaagagaggacacatgccgttggcatcctcgataagtctttataaaatatatagattaatggttatggttgatacttaagacagagctagcaaataagtcattggccagcagcattgtaactagtattaatctctgtgtgttatttgggggccctaatgtggcggtggaactcaggcagctggcagaaagagttatggttacacagagtggtgcttataaatgcatgtgggcatcccataacaggttaccaagcacttgcagatgtgtgtatgtaaaattggaggcagcatctacccaataatagaagcaattgttgagctgaacctcaagttaaaaataggatttgaacatgcagagaaagggtcagtagctctggcaaagggctcttcagttccctagactgacaggatgagaaagtcctactccatctgatattgtgttgccttcttgccttgctagagttcctggtctgaattataaatctcaagctctgagtcatccattccttctgcttgggagggcagagatccaccttcctgccagactcacaaactcagaatattgtcctagtcctgaagagagaaactggacttaaccacctcttgtgaggctgccggggtagggacacaggtttcataaaatgatgcattcatgcataagtatcacaggattatcctttgatttcctgtagacttagaggtgttttctccattcaaaatgttcatggcaggggttggggaggtggctgaatgggtaagagttgtttgcccaagttcaaatccccagcatccacataaaagtatgggcatggctgcacaagcttgtgaccccagtattgggggcagggggtagagaaaggtagatcctgggagcttgctgatcacacaacccaaagagtgaatttccagtttagtgagaggtcctgtctcaaacaatgaaatggaaagtgatcaaggaagatagaacctctttttagccctcacagaacatgctctacatacctgcaagcaacacttataacacacacacacacacacacacacacacacacacacacacacacacacaccacactacacacagtcacacaaaaaagtatttgtgacaaaaatttggcgactcattcaagagccataactatcttttaatgaatacatcccgaatttgatcagcctctaatgtacttggcttgtggatacaccatggtagtaggcagtcatggaaagtctgttaccctggaattatggtcccctttttgtggattcttgatctcattgattaaagaaaattaaaaagatggcttctgaagggagttcaaggaccattttgttagagtttgagaggagcagagtagtcacactgtaaatccctgcagctgctggcaagtggagaagaaggaataatagtacctgttgaattagggtccaagaaagctgcagattcagtaacagagaccagcaggcaactgtattggagtagggtggcctgagcatcttcaaactagagtgagaacatattgtatgtcagggcaagtgtgcttaggattttggcttgtatcaaaacaggtcagatagtaggagcaagggagaagttataccttttggttagaacccagaaagtaggtgagtggtgatctataagcaatagcattgaggaaatggttattgaaatgtacattatatgatcaatgatttttccagtttctttagtaggtcttcacagagtatcagcttttgtgaatggtatctcctattgaggtcattgccaggttcagttgggctaatctcctagaggaggagatagtcaaatataatgttctaatatttgggaccagttttggatgtcaagtctacccagagccagagccagaggtagaattcagttctcattcttttgactaataggtaacaaatttctcttaattggccttaggcaatccctggtactgtctctctcatgtagtattttaaatcttaagtaggagccattaggatgcttctcttaaaattgatattacccagaaaaagacaatgaagtctaacattgactatgggccaagggtccatccttagtggcctctaagcctgttgatgccaatgtagctacctaacaattgttatttacagttatcaactctatgttcccgactttcttgctagctaagggggactgatcatgatacctcatacataggaagctcttaggatgcaggaagagaagcccttcctttctttagatgttctcatgtaaggaaggatacttggagatgttgctgtcaccctctgggactatgactgtgctagacttatttttttttctgtgacataatatcagagaaagccaacttaaaaggaaagatttatttggtttatggtttcagaggttcagcgcatggttggctgatttaattgtcattcggtctatggtgaagcagattatggttgcaggcacatgggttggtgaaggtcaaaaggctgatcaccttgtggcagtgaagcagagagagagcgagcttctcccagagttaaatctctagatattccctcatagacacattcagaagtctctgccctctttgaagagtttaactaccctgaaactccccatattccacttccttttgtgagctggtgaagtgtcgtcatagtgtgaagccttggacacttttatagtgggaaattaccaatacggagtcaggtagaaatataagggtatttaatagggaaaagccttacttacagaacgacctagccagatggcgtggcagtatcctgtacagcaagaagcaaagagagaccgaaagcgaaaatgcagtcatactacgtcactctgaccacgccctcacaagcatggtcaggcacaactgtagccagcccctaagtaggcgtggctacagcttcccctacaattccccttttagtctaaaagaggattaaaacttaacagtataaagtatccaaaattaacaatcataaaggtaaaatataagaagatacaacaatctgcttatgtcacatcctaactatctattttaactaaaccctaaagtcatctgaaagaggtgtccaagcctgaacacctccttccaatcccaaccataaacaataggaagctattactaagtatatacagtatcctaagtgacaacaatggggaaagggggcgtagcattctccaagttacttcctggtgaaatgggatgatgatagtcatgtggggtcctgtaggaagaaaatgttagtatccagtccatgttagatgggattcacttgattgaagatcttgcttgaaatcctcaacttgattcattgcctgtctttacaggcaactgcactcctcaaagagtcatatcattgttgcaggcaaaggtccagactgtcttgggagacaagtgttggtaggaagccaatatgaagaagctggagggtagttactttctcaaaaactccatcttcctgggattagggaccccaagggccttttctgggatgtaggggaagggaggtacaacaagccttggggagaagctagttggctggactatatgccttctcccaaacatcttaggtgacatctgtctcctggggtcagctcctgaatctgcttctcagacagctagacccaagttctttgttttagagaatgaaccaatgagtgtttttttgtcaggtagctaaaggactgaagaactaaagacgggaggaacattgggcctttgagatgactcagtaggtgatggcatctactgtcaagcctcacgacccgaattcaatccctgggaccaaaacgtgggaaggagagacttgaatcccctacattgccctctaacctccacacacacagtgtggtatgtgtgcctgggtaaacatgtctatgcatacacacatgacaagtaaataaaattgcattttttccaatggagaggcatttcagggctcattggatgctgttaaggttagagagaggttattcggtaattaataccttatccaggtgtgcaacctttctgtaggtttagaatgacaatcaaaagagggttttgaaggtttaattgaggatggagtctaaagtgtcccacttcgagaaagttcacatctgtggtatttagaatgttgattacaactgcaaggggtgctgttagagtttgggaaaggaaggcaaaagtaattctgctaaggatgtcttcctgaaaggcatctgctacattattttcaaaggattaatagctgctttccccactattttcttctgctagacccaacatcaatgtcttttcaggcactatacccagtaatgcccagccatgttttccagggctgttcattcagattcctctccaacatggttctcccatgtcttgtctcttgagtaaaacattatcagagcatctcttcctattctagtatttcctccacatgactgactgctattttcttggatcatgggtagttcttccgcagccatctgtggcttactattgtctgtgaggtccaaatgtctttggaggaattctagacatggcattctttctaatatttttccaatgtcatctctctgtaaaatggaacaagactatgacttgttcacaccatgatgcatctatgagctgaggatgatcagataaatttcctgtggttccgtagcacaccatgtccttttatgactccatgttctggagttatcgctcagtctggaatagccctcctttttccatcccacgtacccctcctcctgtagtagttcagtacttatccctagcataggtgtggacttgggaagcccattccacatagaggtccccaagccaagacacacgggggtgggcctaggccctatcccaaaggatatgatagactctgataacaccctatggaaggcctcaccatccagggggagcaaaaaggtagggttttagttggggcgggggtggtaagggaggatgggaaggagaagagaactgggattgacatgtaaaacaatcttgtttctaattcaaataaaaaaaatctgcaaaaaagaaaagaaaagaaaagaaatgacttgtaaacccagactgtgaattcaagtctcagctctttcatttacctggaacaaatgtttttatgtatccaagcccccacaactaaggcttcatggtttgaagtttaatgcttattgtgagatactaagaggatagacacttgatttgaggatgaggttttgaaggtggggttcttggtatgtgaatcagattagagtacagttctcattgtaaaaccggtatcttaatgagtgagagacaacacacacacacacacacacacacacacacacacacacacacactcacacagtctcactctgtagtgatctgcactaccttaagactctgccaagacttgtttttaaatagcttatgcattcatggtgatgcagaaccatcagtagaaatggacaaagattgaagggatgccagctctgagctgtttgtctcccttttacctgtgctcaaggttcaactcaaataccataacaaatcttttcattaggtttaaattacttctttctccatttgatgtcctttattgtctgttttttttctgagaaagaattcatatgcatttgctgtatctgatttgtgtacattctagttcaaactatacatttctgttcatgtggcgtctgtaaaaagcaaaaagtatccaatacttcctagcaaacactggctctttcaaatagtataggtgttcagtaaatatttattcaatgttctgaaaaattgtagcaacaattacacaatttgtcttcctcttgtgccttagtaagaacaaacatcggatgtaatttactatggtctcaggagtgatttttactgaacaaaatatgactgttcagaagccatgatgatgattaaatccattctgctttggaagtgatgttatttttaagaggattttgctttatggaaaaacataggaattgaagattactttccttagttccactacctataaatatattatgcttgtaacagtttcttctgcagatacttctacagagtgcctgatgtatactatatggttggtatactgaagaagtagcttctgtgtaatacctcagaagcaacacattccaacttcagtgcaacatagattttctattacaactcaggcaaaagccttacccttttctttaatgaaagctagacttcaaaattaataccatcattgggtaccacagcaaggaacataaagtccaaagaaatggtgtggctttcttagtgggatacagaatgaagttgtttgaatctaaatctatttcttcttcagtgtttgtatctctctgggcttgatttaaaagaccctctgcagggctggagaagagcttagtagtttaagtacatgcctcccaagcctgatgacttgagcttggattcccagaatctaggagaagcatgaagaagtagaacaaaggtctttaatcccaacaagtccctaccaagagtctagatatggggcttgcttgtctactgtaagcagcagaaaaacaagaggctctgtctcaaacagggatgaagacaaggatacctcaggtcatctgacctctacaagttttgtccctgcatcatgacatgtgtgcacacactcataaacatgaagacacacacacacacacacacacacacacacacacacagacacacacacctaggtatatttcagtcacctaaacatagactttctctttcagccctatctccttggccctgtacctgtgaattcaagtcagagagatccagccttcattctccagtggtgtctaagatctctgacctatcattcccctctggtttcttctccttggagctgcaatacttctttcttggtcttttctttcagtattgtttccttttgttgtcagtaaagacactcctctctaccagctttcagaaaccatcaaatctaagtaacatctggatatatatatatatatatatatatatatatatatatattatatatccttttcacaatcctaaccttctccaaaccatgcagagttggtggccttagactaatctaactgcagcagtctttgtcatccacttgtctctattgaaaatcacctaggagatacacccctaagcatatccatgaggggtttttgagagagagatgtagtgcagtacagaagacccatccaggctgtggatagcagcatcccctgggctgggctcctgggataaataaaagagaaaaaagacaagaaggatgctcatttgtctcttctgcttgtctgtgagtacagtgtgaccgttatgtgccattcttgtcactgtgattatccatcaacatagaagatgccctctgtcctcccttcatttccactcctgtgatgaaaactgtgacaaaaagcaacttagggaagaaaggggttattttatttcacagttccaggttgtagtctatcactgtggacagtcagagcaggaacttgaagcagccaatcacatcgagtccataggaaagaaagaatgaatgtgtacatgcccaccactcagcccacctttcctcttatagagtccagaacctaggtttgcctaggaagcggtactgcccacagtgggctgggtcttcctgtatcagtgaactgtaatccaggcagtctcgcacagacatgcccacaagacaggccgacctaacaatctttctctgagactcttttctcagttgattccagattgtgttaaaataacaattaaaactaaccatcaaatcctcaaacacatccttaagttcatttcttcaggtctgttatagtaataagtgaaatagctaaagcactaaccacagtgcatgattggttaagagaagtgtgtgtgtgtgtgtgtgtgtgtgtgtgtgtgtgtgtgcatgcgcacacataccttaagaaaaagttgataagagactttttttggaaatagatgagttgagtgagtcaaaatagagattcgggttcttcttgctttaaaaaaccatttctatttctcctttgtcttctagtcatgaacccataattattccattgttcccaggtgtattttcccatgaaatgactattttcatcaactcttcaaagagtggtataaaatgaccataacttctagaaatgttggaacctatatagagtgcatctgtgtcctgtcactgtctggccattatttcagtgctttggtatttgatatacatcatagttagcttcagctgtcaacttgacaaacctagagtcacctgggaagaaagaactacaactgaagaattgcttagatcggaccggcccatgggcacatctaagagacatttttttttattgctggttaatgtggaaggatccagcccattgtgggcagtgtcattcctaggcaaatagactggactgtctaagacaagttagctaagacaagggaagcaagccagtaagcagtgttcctcctccatggtctctggttcctgacttgaattcctgcccaggcttctcttgatgctggattgtgacctgtaagccaaataagcccttccttccccttcttgcttttggccatgttatcacagcaacaggaagcaaactagaatgatatactagaagtgtattgctaaacctgagtactaatatttccactttttaaacatttcccaatgttcaagaaaatcaatttgagtttcttctcaattttaattattggaacattaatgcacatgtttggaaccttgttttctttccacgtgacaaagatttctggggaattttataatacatttattcattcccaggaagtgactgaatcttcatgtctagggtgctgctcttattttagggctgtagctatgaacgggatagagctgctactgccagggagattttcttccattttgaacaaggatcttccagtcatttggttcttaaatgaggacagcccctttcttccaggtccacagtagtcactactgcccttcttcctcatggtcatatacattctgtggccactacatatccctatatatggtcatatgatcttaatatctggctttccttctagaaagtagggtgatatttcaccatttcctggtacacttaaggcattaaaaacaagagtgcaaggtaaattctcagttgatgattgaccacatggatacttttatatttatgataagatttaagagctagatcaatcaaagtattagaatcacttctcttatcttgggtaattgtgctttgaatcacatggttgaaaagcaatacattcagtgcacacatcagactcaaacattgcatgtatagtttcttgagcatgacactggttgacaatctcgcaggtacaaaccagactaaaatggtacagataatattagcagcaataacacatgaacgtaactgaacacacaggatattctgggatcatgctgaatgctttccatgtgtatcttaggggtccccatggccactgtctggggaagaattgatgtttctctttttgtattaaaagagaaaagacacaagtttagagtattgactctacttttgtgataactatccagtgataataatttgactgctttttctttgttttgatatggccagacaatagactgacagatgcttcctgtacttaattccaaacatagatctacctcttgtgatatactttctaaggatgagtaatatgtgtgaacacctctcaaaagagcttctttctgtagcttcgaacttatgtcctaccttccaaagacctttctctctcctcttttcttcagtggaagcattatttagttgtcttagtcacattcattactaatgagataggataaattatattaattttaacttttttttttggtttttcgagacagggtttctctgtttagctttggagcctatcctggcactcgctctggagccaggctgaactcacagagatcctcctgcctctgcctcctgagtgctgggattaaaggcgtgtgccaccaatccctggctgagaaccaatcttaaacaaaccaaaacataatccactgatttaagtgtcactcccataatgttgtgcttgctgatggcactcctgcccttcggttcacagccaaggctgacccctggcttctttgtatccctgtttctcctcataatcttttatggcctttctttgacctcaagaatctccctcataacctaatcttgaagataggttcttggctttgtcacttttgtgtagacactgcttgaatctggtaggcatttagacaagtaaatgctgggtaaatggttagattcctccatctcccccgccccccgccctgccatagattaaccagattggaaaagttgactttagacatcagccaaatatacaatggcaaaaatatcttccaaatgatttgaatgagatttccgggatttcccactctagagactcagtaacagtatatctggcaaggggagtgcttgctagtctcatgtcctgttagataattaagacccctagaagagtagattttaattagaccctgaaacctcaccgttcccgaagcttttgacttaagtacaaggtataatgtaagtcacgagggtccgcttactcctttagtttctcattattgtggaggctttgattcttcgtgaaagcacaatttacttggagtgctgcttgcaaattgccatttaacaatttatggtcctggaacatggtacaccctttacaaataggagctcttattagccatctcctgttcttcgcagtatctgacgtgcttttgcaaaacaaaaacaagagctggtatccaacaaatgctttggaatgaaagaataaatagactagaccacaattgtaaggctggagtagaggaggaattgttacaagcctttgctggctgtgatcggtgtgcttaccctcaggaagtagcatggttagtgcctcctggatagcaaggcagatatttttgtcctgtactattaagcccagtaattgttttctttctgcacatggggagcaggtgcatggggggagtgggcacttgagagcctagactccctttaaaaagaaaaacaacatggaagttattttgagttcctagctcagtagacccatttatacttgccattcctgcaaagcctgcggagccattatgttctgagtccctgagggctgacaatcactgatgaaaagccaggaggttagggtgagaggaaaaaatgataagcaaaagggacacagtactttttcttttgtactcaaaatcaacaattgtggtgggtggtgaaggagaatggcctccaggagcgcatacatctgaatgcttagtcaccagggattgggactctgagaaagattagaaggatcaggtggtctggcctcatgggaggatgtgtgtcactcgggggtgagctttgagggttcaatagccacagcaggcccaggttctttctctcaggatgtagctctcagctactgctcagtgcctgcctgcaggcctccatgctccctgccatgctggcaatggactacacctttgaaactgtaagcaagcccccaattaaatgctttcttttatgaattgttgtggtcatggcgtttcttcacagcaagagaaccgtgactaagacaatagtcagatatatgtaagtcagtatgtaatacctatcaaggggaaaagtgctgaatactgggtagttttcagaccagaggaactcttctaataaatgataaagaaacagaaaggctggaaatagatggggtggaagagacaaggtgagccacattagcatcccagggcttatcagaggatgtttgcgcaaatgtttgtgctgacaccattgtggggtcataatacccacctccctgctctggagacttcaactctctgctaatgttttatgaatcttttcatttcaagagatacacatatgttcaaaccactgtatgagtgctcttgacacagtcctatttcatacagtacgtcccagccttcctgtggtgtagcggaatttctctccaaggacactttagaaattaagacgctgccttgggtaccaatttgactctatagattatatataagaaatgacttaaaaagagggcttgaagttgggagggagtcttagtggggggtcttggaagagttggaagggacagtgggcagggatttgatcatcatatgcatgcatggaattctcagagactagataaaatatgttttaaaatgatactttcccccatttacaaatatttaatttgcataaaggccacaacgttggcaaacttaagtgtcttagttcagaactaggcgatgccctgttacaaactaaataacagggctggagagatagctcagcagttaagagctctcactgctcttgcaggggacccaggtttggttcctggtacccacatggaggctgatagtgaacaaccacctggaactccagttcctgtggattggccatcatcttctgctcccccacccatgtactgcacacatatggggcaagcaaatacattcaggtgaaacactcttcatcgtaaaacgtaaaaaactcatattactttatcttagaaataaaatttaatatctctgtgctactggaatgctagatacagtcactttctttcttccttccttccttccttccttcctttctttctttctttctttctttctttctttctttctttctttctctctttctcttttttaaaaaaacaaaaaacaggatgccagtatgcctgtaccgaagcttcacttcttaaggtcaaacctggcatgtttttttttttccctataaaattgagattttttaaaaagaatgaaatacataaaaccaagtaggatggtagaattagatgtttccattattcagaattgcagggctgggaggatgtggtttggtgacagaggacttgccgagcatgcgccgagccctatgtttagtccttagcactgagaacaaacatctcatcaaaacaaaagcctttggttccgggaagcatttgaaacaacctccccagcctctcccacctccctcccaagtgatgactgtacatggaaaatgacttaatccagttgagcaaaaacaacatatcaatgactcatattaagaaagaaagcacagcctttggctgcatgaatggaggcttctacaatccttcttaccaccccctccctctgcaactgtccaaacagtccgtgggaagaaggaagaacgcgggatttgtgctaggtttatggcgattgaaatgagaataaggaaaactatctcaccatccagacaggattgggagctttagaagcggcgtgtggttaggcagagtaagaggacaagagctggagggatggaatggagcaagccaggcaaggcaaacttgttttgtaccaacttagatttcttttccccacatctttgaacttcccatattttggtccacaccctctgtcaacttttgcagacctgtgcagatctgtctgagagacctccggtctgaggacctgaaagagtggggtgggccacagtctgatgcagtaaacaacctcccttcagttccagtgtacttgtacatgtgaatgcaacaaagaaggctacgatccaaggaaggttacttgagttcagaaaaacatgtcatttatttattcctgtaaggacatactaaatattaagagagcagccctttcccagaactttttcaggaagtttaaacacaattgtctggcacatactaaaggttagatctagaaaagcatggaaacaagatagaaggccatgtccagagccagggtacactgaggacagcacctagcacatccttccaacagattggattctatcgctatattctgatatccaaacaagaacaaacgtaagttctaaattgagtgtatatgtttgttgcaggacacatgaaatcacatccaagaacaacccaggaaacaaaattcacctcaggtaaaaggccctctgcctttttcccctggagcctgtctcacagttccctgcagcattgttcgctgtgggacattcaatgctctttgttatccttctccatgctcacctcactcatcatctcccagagacaccccactgtcctttcttagagctttcatatgtcactcagcccgtgatgccaatctgatgcatacagaagtgcctccatgcgttagcctcaatttcaaatatttatgagaatttcatttcctcagccagaaaataaaccttcaagatgacttctgctacatttgcttcaactttctcagtttgatgggcatatgttgtaactgaaataattcccgattccttgatgtgctgcttttctgggaacagtaagaatccctccaagagcatgtttatcatccttccatccaatcttggcatttctgctcgcaggctctagatgtgatgatgatttaagtgttaccctgtcacacgcaggtgtgacttctccacagaacaacctggaaaacaatctgtaattctgtttgactgtgtgtgctggtccatgtcccctccttagctgtctagttgaaatgcctttgtgtaaccttaccctggcatatatgtggtaactctcaagagggtgttaaaagggctggagagatgatggctcaacaaataagaacgcttgctgccaagcattaggctaagcttgggattcctgttgaagagagggagaaaggattgtagaagccagaggggtcaaggacatcccaagaaaacccacagaaacaactaacctgaacacataggatctcacagactctgaaccaacaaccagggagcctacatgggactgacctaggctgtctacttatatgtgacagtagtgtagcttggtctacttgtgggatgcctaagagtgggagcaggggcttccctaatactttgattggctcttggaacctgtttctcctactgggtagccttgcccaaacttgatacaagggcagtgcttagtcttactgcaacgtgatccgccatgctttgctgacacccatgggaggcctgcccctttctgaacagaaatagagaaggaatggattgaggtggggtggaggagaaattaggggaggggataggaggacaggaagtagggaaaactgcagtcagtaaaaaagcaaagtctattctgcggccttgagagatggctcaatggttaatcgtactggccgctcttccagaagacatgggttcaattcctagcacccacataggcagttcacagtcatctgtaaagccagtcccagtggatcttgtgccctctttctggccttctggggtactacatgcatgtgatgcacagatatacatgacctcgaaacacatacaaattttaaaaatagattcttttataaatggagtcatgatcttacttaatttgtctgctctgaaggcgtgctccctagatagccagcgctatttctttgtatgttgctgttgacttcgtaagcaagatccatagatcacattggaatatgtttcctcatgtgacttaaagactgtgtggaaaccacaggcacaatgcctttggagttctgctgagaagaaaaaaaacaggaccacatttagcttttctgctgtctcttgacttctcagatggagtcaccaggtaaaaatgagctagaataaaatgcttgctttttcttccagaggacttgggaatggccttgtgattagcgtgacaggtacccacatagtcagtgcttggctgcagctggtggcactgctgggagttggtggaacctttccaaggttggatctagtggcagagcgctaggttactgggggttgactattgaagaggacaatggaactctgccaccacctttgttttcccagccagctttcccaactgtcctagttatggttactattactgtgatgaaacaccatgaccaaagaatttgggaatggaaaggtttattcagcttatgcatccccattacagttcatcgtcaaaggacgtcaggacaggaactcgagcagggcaggaacctggagccaggaactgacacagagaccatggaggaatgctgcttactggcttgttcttcatgacttagcctgctttcttacagcacccaggaccatcagcccagggatggtaccacccatagagggctgggctctccccatcaatcactaatcaagaaaattccctacaggccttcctatagccagatattatggtggcattttttcacttgaggctccctcctctctgatgactctagcctgtgtcatgttgacataaaactagccagtacactgaccatgatggaaagcttgcaatagtcccaaaagttattgagctagtgaccacagcaactccatagacaggaaggacccttgtaccataactaggagggagtgccctctgttaatctccacagctgtgtcccaagcaggttgaaaagagaaaaatgtcaaacagggtgacaacaagacatattttcatttaagattgaggactagacagcaaagatcatttttggtatctgtgagaaaaatgcattgggtttgcctagtgaatgctgtgtgtgcatgtgtgtacgtgtactaatgtgccgagctcctaattagcttggagatcttgggatgggatatttatacacagtggtttggaggtaggatgctggttgatgggtatgacccaagaggatgcaggtggtacctggagatgtgagggttacatgtgaaagaccagaagaacaatcaagctaagttgctgcctttttacccaaaccctttttctcagtacccaataacagggtttttttttgtccagttgtatataaaggagagtttataagttaaatgatacggaacaatctctcggcttacaaggcgggatggctgagctcaagaagggattgtgtttctcagaggattatgtgagcacaacttggccacatcttacacactggtgaaatgggcaccagaacagccattttaattgggtctctctgcctttccctttgtttgagttttaggaataatttgctattgtgagaaaatcagcaagatcgtcaaatccgtagttaggtgttgagtgttgagggcttactgtgtgctggactgtgacaggtgacagggttataatgacaaagacacactgtctcccctcctatgagtccctatgagttgcacatggctgataatgacatagactatctgtgatagacacttcaatggtgaagtaaggcagcatatatgaaaatattttgctcacctcaaacattttaattaaaaattattaagaattctgttgattaggggactggagaccacatttttaaacaaattaaaaaatgctatagaataaatagggctgtaattaagaccttcatgatgccttccttaaaatgatatagatgtaattgggatatatatagtgtatatatacaaatgtatgatttatattattcatactttatacataattttaacattcatactgatacattataatgatgaatatgatcatcttgggtcttattcatttttaattttgatccttaaagcaacttaaagtggttcactgcacatgtatagggcccccgaatatctcattcctacctgcttattgtctttaacagacagaggtggcccactaagaacaaaggagatgccagggatatggagtagaggaagctagtcctggcagggttattttgctagaacctcacagatgaggtggcatctgagttaggacttgcagccagaccaaagttaggtaggaaatagcattctgaggctgggagagcatcagcaaagagttgaggcaatgtgcggttccttcttgggaggacaggtggtcagacagcagaatgggagaaggtcagagcccatgaaagcctacaaaagtgaccaagccttgttatccttcagtgttctccattcctgacgttttcttcagtctaatctagtgttttctaattcattaacaacgtaggtgatgatatccatattatgcctgcctcatacttctagcttatcaattttgattctctaagcactctactgttgttaccataatgtctaactttgtggaggcagtttgaaatccactttctaaaactcctttgatgtgtaggcttgctggtctcaaatattcctttagaatttctttagttagtttgctcaggcaaggtcttcatatatagttctagctggccaggagcttactatgtagcccaaaatggccttgaatttgtgattctcctgcctgtgtctcttcagtgctgaagtggcaggcacttgcctttcctcaacctcagatctgcctcccttattttctaaaaaaaagtctttattatgctcttgtccttgaaaagtagttctgctggagagagaaatctaagaggaccattattttcctcatgacattttgaaaatcattgccagctgttcttgaacttctattgttgcctgtgagacgacatgtccatttttttgccttcctttctatagttcattctgctaagtaaaatgaacagtgtttattctgctttctgtggtcttgggttggtgttttacattggttctgacaaacttggccattttctctcctgattctgccttccttataccccatccattttccttggggacttaagttagataaggatagggctggtgactcgatgctctgactgagcctctttcatttcttcccacctcacctcactcatctaaacagtagatcagccctaagtctgaagcgttactttagcctttctcttatggagcacatcttgtttatagctcacattcacctctgcacaggtgactcctgtctccagacctggctgtcccagagctgtaggctgtggtcacacatgctgctgcctagctctactccacatgccatcatcctggtgatcccacagcccactttcttttccttccttggcgctgacctgtctttgttttcattcaaagactgacgtcttttcttctctctctgttctttacactgactgttgcatctgaccatgcaaatggtcaacaaagggcttgtcccaaagcttcccacttaactgacctcgtaatcattcttttcacatgggactcttgtttgaatctaagaagtgtgcccatcgttttgaccccgtctctcaaaaatgccctctacaaagttcaatcttgagaattgtgcaaccaagtcacagaaactcttccaaaacatctcataatgttaaaccttaaaagtaagtttaagattctgtgtttaagttggaaaaaaactggctcagcagttaagagcactggctggtcttccagagggtgagggttcaattcccagcaccaacatggcagctcaaaactgtctgtaactctggttccaaggaatccagcagcctcttctggtaaacactgtatgcatgtggtaaaacactcacacacaatacaaaaataccaaaataaacatctataaaatgattttgtgttagtctgaattcatagctatcctgaaatgcatgtacccataggcaataggttggtaatgccaagtagagaataaattctaagcactttagtgttacatttcaaaatcttccagagccaaagcctatcacagttcatttctctgctgttgagactgcatcaggccttgagagtgtgacaagactagaaataagcatttcatacttatgaatgttctacttatgaataaaatatttgtgaagatgggaaataataaaattgagtacatgaaaaatcaaaagttctgaatcatgtgatacccgccatgcatgagcactgtcctaagaactttacatgtgttgtctcatttcactctcatatgttcacaaatatttccagtttctagagaagaaaacaggcatagaaggactggggagatgactcagtccatttgaacaaatactctacaagccatgaggtcttgagtttgaatccctaatacctactatcaagccccgcccccatcttaccttccaccagttctcagcaataccatcatatcatgaacccaacaagggcttaatcattcatcaggccagagacccatcatctgtatatctttaaaaatatcctcacagacacacagatgtatgcttcattaatctaacagatactccttaatccaatcaactttacaatgaagttgggcctcacaggtgccttgggaaaaagaaaactacataagatatcaaggcaaatgtcaaatatatggacatgaagtccctaggggaagactggtcaggatttatgcgtgtatgtgtgagtacatgccttgtgtgtgtgtgggtgctcacagaggccagaagagggtgttgaatctccttggagccagagttacaggtggctgtgagccacctgacagggattctgagaactgaacctgggtcttctggaagaacagcaagtgtttgttcagaactgctgaggcatctttccaaacccctagacttctaagtctgagttgggtagatggtgccatactgcacaaaatgacacttttaacatgtagtggaaaggaatccagcccttgtttcagtgactttggacagctggaagaagaacctgttgaagatgtgtctcctgctggaaggaattttagatcctgtttgtgaggtctgctttaatcttttgtagaagatttgaacgaagggtgaaggccgagtgggaggaattaattatagattcctccacagaacaccactggataatcaccggtcttttatcaataggagctggttttggaaattgtggtttgagtctattaaatggagggggaggacagacagacagacacacacacagaggtaggtacacacacgtgcaacacacaatttatttcaaactgctgcaaaactgttaaactagtattcatttgtatactataacttaaaacatttgaagcattgaaaattaaattttcttgtagaaacaaaccacaagttctacaatgaatggcttgaatagtgctacaattttcttgctgtgtaacttacagataaagcatcttttcatctccctagcaaattgtcaccctactttagaagaccatgtcaggcggtcttacaacatgatgtcctgtgattttcaatacttttccagctatttctgagatagttataaaacatctccaaaatagatctctgaaaattcctttaatgtgtgtgtgtgtttgtgtgtatgtatgtatgtatgtatgtatgtatgtatgtatgtatgtatatgcacatgcttgtaaaggccagaaaagaataattttaggtattgttccttgggtactgtcccccttgttttttttcttcttttttttttaaacagcccccacccacctccacaccttatgaagtaggccgttatttaacctgagaggcccacagatctgcctgcctctgtgtccccagtgttggagttataagtttgtgcaaccaatcctggctttggggaattgaattcaggtcttaaaaacactttacttactgaactgtctccccagtcccaagttcaaggtctttgctcttagcagtttcttatatcatttaacaatacatctgtgttttataaaatgtcaaagtagaattttatttatatcctgtttagtgccctcctattagacttaacttaaagctgtcctaaagactggattgtgctatttatgaaacaaaatgccctttcccaactggaactccttttatattgtagccattttcaggaatatggtgtggtatatgctcctacagacctgcaggaatctgtgaccatacttacctcacctgatggtcctttgagtaggaagtggcagtgtgtatagctggaggtagtaggctattatcatattttaataaataataaatgcaaagtgtgagggattgcttgtgttaacagagtcagtagagaagagaatctccaatctgatgtaaattcagtatgatttttaccttctcaaactctaaaatgaggtctctacagggaagtaaaaaggaatttccacatatttatcctttcctgagttgttagactagactagtattagaacttaccttcctgtagggtctgtattagtttcaaggcggctctgacaaagtaccacacatggagtggtttaaataacagaaagctattgctgtctaggaagtccaagtccaagaagtcagcagctagagtcattccttctgaggatgcatagcaagggtgttctctgagcttcctccttgcttggagaaggctggcttctctctgtgtcttccatttcatcttgcttccacatgtctctgcatccaaaaggacaccagtcgtattaaaacaaggttcaccccaatgaccttattttaacttgattatcactgtaaataccttgtgtaatgataactctttcctccaagctgcctgagccccactgccacgtgggtgcccaaaataacacacagagacttatattatttataatgctgctggccaataactaactaggatttcttatctgctatctctgtcttaagtattgaaagaccctctaggtgaggagtctccccaatccggctggtcacccaagaactcaaagtccagttcaattgatgcaatgagcaagaggctttaatgaacggaaagtgtttgtacaaaggggccctctcagcacgcaggctagagagaagccccattccccaggcacaggcgtttttttagaggcaaaacccacaagctttggcagggagggttgtgactctccaggcccatccattgggcaaatagaccagacctcagaatgtgctaatcaatcttgcctaagacagaggtctttgtttttcaaggacttacttatcactttttgactcatggtcagttagttcccttaatgggttcctctggggagtgcagccatctggaaattcttggtgctctagctatcttatggccttgtaggggagattccaggaactgagtcatgggaccttggtcagcaagtctctgggtcaggagcaattcttcctgcaagggggtggggtaggtgggtaggtagcagagccgcatctgtttccttgctaatttttaaatctttcagtatcaaccataattattaatctatatattttataaagacttatctgattgaggactctggcagcatgcgtcctctcttgtcgggctcacatggcagctccagagaagagagcaggaggaagaggaagagagcaatttcctgcttgtccctgcttatattctgagtctgcctggtatgtcacttcctgcctggatcacaagacttctctttactacatttcgagaatcctccttgactcctagtcccaactatcttgcttccctgttggccagcagtactttatttatcaaccaataagacaaacatatacgcacaaggacttcccccatcaatcttgttgttaaacaaggtgtcacattccttacttgggagtttagggcttccacataagatttggaaagaaggcactaccaaaattcaacctataatggagctgtaaggcaaatttcatctcttaaaaaaatgatcataagagcagttatagaaggggatcttttatccaagcccgatttcccaccaaggtccttgtgtcttgtgtgttctactgttgtggtcagtttatgtcaccatttagctttcaagtgacagactgggtgcttttcctagctcactgtcagctgcaactttctgaatagtctctggagatatttttttggttggggggaggcagctgctggatttattcacttgtttaatgatttcaggattcaaatgtatcatttaacttggtgtctgacatttgtggtgaattttgctcagtgctcagtgctaatttgatgccttctgagcagtttccttcttccatagttggttaaggcgtcaagggattccaaatgcagggaacaaaagttagggtggtaacattctgtatgtcaaagcagtttgcagtatggaaagtgcatcccagtaatcagcaccatcccaccttcttggaaaaccaaagggcagaacatggcctgactttagatggctggtgccagaatgctgtagatgttggagcttgtctgtcactctgcttcctcactgtgtatatcccacctgtgtgtttttctttctggtcatatggccatatggatattgcatagatggatcaatgtgtgtatatagtaagaaacaaatctcgagcttttttttttttaagagaaaatagtattatgttaaatatagaaaatttgcttatgcgcatagatttataatattggtaaatttatttgatttttctttctttttttggtttagtttttcaagacagggtttctctctatagccttgactgtcctggaacttgctctgtagaccaggttggccttgaactcacaaagatccacctgcctctgattttccagtgctggcattaaaggtatgcacctccattgcccagcttatttgatcttttttaaagtgagtattttttcaattaatagaagaaagaacactttctgtttgtgttgggtgcaatgactaaatacggaagccgctctccttcatctgaggttctcccattgtacctgcccatctcttgtatcctatgtaaccacttgtatcctatgatttttctgtaatgttattatttatctttatatattcactttatagatttatatttctatgtagcatattgtttaattttaaagtaaaaaaattcttaaactgctagagatttataaaaatataagctctcatatgttttcctaggtttaacattttgctaactttatatttcccctactatctccggtactctttaatacagtttctcatgttgtggtgacccccagccataaaattattttattgctacttcataactataattttgctactgttattaataataatgtaaatatttgctatgcacccttgtgggggtattgatcccccaagttgagcaccaggactctagagagatgtatctacccacataagttatgcttctctgagctgagagtaagttatagatagacatgattatgatgattagagagtctctgcccaggttgggggctggacttctgatggcctggatggcctctggttcagcagggattgctgccaagtttggggctggcattctggctatctgtatgacctctgatctggccggggtcctctggggttcaggatgctggcctggcttctggtgaggcaggagtcttctgccagaggtgtgggctaggatatggtgacaaggagaggagaagtggttggggttatgctgggcaggtgcaggcagggtgtggggacagagttaccttgggttcagggagctggcttctggtggggaaggaggcttccgccagacatgtgtgggggaaatattctatcacctctggtttatatgaccagacatgcaatcaacaggaaaaacctctaggcagacggattgtacagcaaatacttctgtttgctctgtacctggggtggtcacacagcctgttccactctcttactcacaaaaagaatattggatcagaacaactaagcccttcgtagtattctttggtgctgtttggtacctttaaccccactctgccttgataggctaatctttgtttttcagaccaatgtcatgttttccattcatcagtttgacgtgaattgcactaacatagcagggtgtgtctctgccaggagcctcagaaatctctgaagtgaatacctttgttctggtcttctatcccatgacagtgacctgagtaggtctacatgacaagtacagatagcagctacccccttttgctgtgtagctgagctgtttcacaattgtccagaagtttactctactccatggcaacaagcattttgcccaaatttcccatctggtgttgaagcctgtatcttgcagagacttgtgtcatatgctgacagtcatcatctgcctttggctttagtatttctgacattatcatgctgctcatcctaaacagtcatcatttcacagaagaggcgcttgggctggtttgcttagcagaaggaacttcagttccccatttggaaaactaaggatttggctggctgagaaagcccctgccagctggaactgtctatggttttaggcaactttgtttttaatgatttgtgtatgtgattgacagcttgcttagatggagaccctggcctgtaaggaggaaggcctgagggccatgctaggcacttgagttagcaaacaagtgaatggcatcatgagcccagactgtctaggggtgaggaggccatttaaccatgaagaatgtatcaactgcatttttcatcagatttttagagatttcccaaaaataaatctgaaggttggacatggcttataactcctaattatttttggtctggatttctcacactgttttctcgggcctgtggtgggtctccactggcatgtttggtgtttctgaacataccaaacacatcctgtgttgagtttctgatgctctcagaatattctagttactctccccaaccttcttggaaaaaaaaatccatgcttaaatagcatctctctgagagaccatcacatataacttttagtccattcaacattcattttccattacaacattctgtatcaaatgtcataggtgttatatttactacaaatcaattgctcccaatccctgtgataatgctacataacaaacagtccacagacagtattggatgaacaagtatgcaaataagagcaagaaaaaaaatgaaacacttggcttgtgaattaaagttccccaacctaatgctccaatatcattgagagtaggcctttgtctgtagtgcctcttgtggcttttcacttcctcacttctgttcctgtcactgccccttccatctcttatcatctaccttggatatttatcaagtaccaattcctttctattactgtcagattctgacatttctatgagaccttttctgcccacaccactctttcttcctctggtgtagtgggggatgcgcctcagcatgctcctccttctccgtgtccatcttactcctcatctatctggtgtacttttactccccagccagagactttgcatctggagactagactttagtatcaggggtttgtaattttacattttcctaggcattgtgagtagaattatctttataatgagaagaagaaagggaaaccactatcaatttttttctataaagagacaactactgtcccccaaaggatgtcagagtttgatgatccctctcggaaggcctcactatccttgggcagtgggtgggcggtggggagcatgggaggatgggagagagagagaatggaggattgataggattgtttctaaaataaaaaatatatgcaagcaaaaagagacaactactattaatacatacataatccctccaatatatatgttcatgtatatacccatccctgtacccattccatattatcaaaaatgtcattatacatgcatggtacctagtaacttggattttttacaaagatactttaacactatataaaggataattttccattcagtcaatctgtcttcattgctttagtcattattctgtttagtcctttctaatcttgagactatagtttttcactatgtgtggtgtatactttgaggatagtttgagtgaaagctttggagatagggtagatatagaatcagtgttgtgaatgactaaactatgagttgcctggagaaatactcttcacactcaaaagaaaacctcacgtcttcctaaaagaattttaaaaagcagtataaggtttcaaacttttaaagctagtgctatatatgacttgttaaatgtaaatatattcagagccaattatttctagaaattttaaaatatgcactccttcaaattaaaccgtgatagtaatctttatagtgttctggattgtggaaggggcagtatggcaacatgtgcccttaatctcagcacatggaaggcagagacaggcagatctctatgaattcaaggttagcttaatcaacatagcaattgtggacctgtcagggtgacatagtcagacccaaatatgaactttctccttttaaatggtctgaaatgtcatactgccccctttccctattgagttatgaatcctggtctaatcccttagacagttttagtctaacatagtatattttcttcttggaagtctcattggacatttgttgttataccattcatgggcataaattgaaacatttaaaacttcccagaaacatgaggaagttaaaaaatgtctattacatgtatcaataggtaatttattatatgtaaataaaaagctatttcctaccattacataatgggtcaatgagtattactggttatgggcactaagtagagcagcataatttttcttattgtccactttcatatatatcagtgttgaaagcaattttcatataagtcaaacgaatgtggatagaacagttttaagcaacattgaccaattttttacactttaaaattatttaaagtaagtattaattgtcagttacttttaatattctattaggtgacaagcgattagttcatctgacattcagttggttctgttggcaggaaaggccatagtactagagaaaatatcacaaggtgtcaggtataggggttatgtattatgtaatatgttatttcataaggctttatacccatccagggtgtgtttatcatagaaaaaagttgttgatcattagctttccacaggggtagcaaaatggcctcaagtttccccatttcatttacatctctccagaataaactgtccatttttattttgctccaaaacatttattcctaatatatttcaaatatgtttattgaagtgttttcctacttatttctgatgtttataatagaacacttctgaaaaagcattgctaagttctaattttatgttttttttaggtataggttctgagtgttgattcctcctttttaaatgtttattgattcaggtataatctttataatcatctaattattttaacttaggaattacttctgatcaatatcccaattttaaggcatgtctcaatgaacaaagaaaccaatgtttccttttcagttacacaattatttttttcttgaggtgtatcaccttaattctcacttcattaagtagataatttttaattttctaatgggttttcaaattttattttttactgaaacacttttttctcacaatattgcatctaaaatgaaaacaggaagtgctttgagatctggctcggcggtagagcacttgcctatcaagtcatgctgtatcaccacaaaacaaagcaagcaaagaaaccaaaccgacaggggctatttcctgcattctaatctcatgacttcctatcttatcttgttgagcaatctacttacacagaaaacagccacagtacacttgatcacttactgtgttccagacatatgctaaattcattactagaattgtcatatttagtctccacagtagccttgtaaagtgagagtgtttccccacaacaggctaacagcaatcttattaggttgaagttgggtggttttgcacaacagtccttcctttagtcacattaatgaaggagaaatgatgctcctgtcccattcgtgtgactgtacagaagaacacctttgaaatctcaggtctacatttttgcagatgttgtatacactttacctttatggatgatcaaatgcaaactattgccacttttgttttgctaccaaactcaatcccatttggtaccaaatatcttttgaaattcactcagcatcacaacagtctcctttgaaaacatttgtgtgtttagtgtcaacaaatggttacgatttggtaatatctgattctcttctttttttctctcttaaagatagtgtttttagaagaatcatctcagcaggaaaaactggccaaagagtggtgcttcaaaccatgtgagatcagagagctgagccaccagtaagtctctgccaatgccttccaatttgctgggagccagtaccaacgttcaagtgatgagaagtgtgccttgagagatggagcaggctttctaatttaagcagttggctatcagtggggaagatgggtgagaggaaagcaatctgaagaacagaaactttgaggacaagaggctgctgtcattcctttattaaacatctgttgggtattttgtgtgaagtattaaaatcttgacaagtctttacccccatataagcacatgggagggtggggacaaaacagggaaaccatcaaggaacagactgagaaacaaccattctaatggcatgcttagcgaagacctgtgtccagaatgcatttgagttgacattttaatggtctttacaatttgtataaaatgtattttctgtgctgggctgtctccatagtctggctgatttcttttgtacaaatgaaagcacttgttataagctcaaatacttttatctaatttcagaaggctatttttccaaatcaaataaaagtggcaccaccatttttattctgaaaatatgtttaaaacttgggaagtgactttaggatgaagtaatgaaaaattcatttaactagtgatggtattcaaactgggtgacgtgggccttagcctgcagtcagctgttctggttgtgtggcttcttttggtgtttgccatttatttagaccatgagtggaagggtggaaagtgccagcacatgcctgtaatcccaacacttggcggaggactgcaggttcaagactagtctgtgttacatattgagactacacctcaaaaaggaaatgagaagtggcggggtcggggggggggtgtcggggatgagtgggatatgaaactgtggttgtaggttagtgatagaagacatgcttattatgtataaagttcttgggttttattcccagtagtacaaaaaaaagttaaatatgtgacagatttcgatgattccccatggaaggcctcaccctccctggggagtagatgggggcatcggtggggggcatgggagaatgggagggagagggaactgagatttatatgtaaagtgaaattgtttctaaattaagtaaaaatatattaaaaagttaaaaataaagaaatagaaaagatgggtaggtgttttgattactgtgtatagggatgtatagtgttcttcttgatttttataaggttaaactactatttcaggtttaaaacgtgaagttgatgttctaagggaattatgcttactaacataggatggaaaaggctgaaaagtgatgagaggagagctacttcatttctgtctggtgcagccagtgggccaccttttttgctgtgtctgaagttggctcctgataggtactatccagctccaagtcattttatgaatagtgaacagacttttcaccttagcaagggcattgacaaattacaagtctgtaaccatccccaagctgcatctttctgtctgtaagatgaggtggtacacttgagggctttcttccacctgcttctcccacactatacactctcgaatctttatctcagcaaaccccatactcatcccttaagtatgtggactttgctaatgtcacagcccagtgcttgctgtattgggtaaaagccactcaggccgcagagggtccttcctagcccatcttcttctcttgaaggctgcaccctcaaatacctcctttcctcttgcctctttttttactgatagcacacaccggtttcccttgcataaaagagaacaaaacaaaacgaagtctcatgtactcttcccatcctcatattttgctatgaaatatgcccaattctctatcacccacatctggagcacagcacttctcagcaccttggacagaactaacacagcttgagtaaattccttagatgtcgaatgccctgggctcacagcattagagatactacagtttctctgaggctttgtatatcttgccttcagatttatttttgtcactggtcactccactgcctcctttgtcattctctctgatatctctgtgtcctgggtccccactattttcttgacagtttggccgatggcagtcaccatcaccttctcttcctctgtccttacgtgggtgctgttgctcaagatttagctttctttctatagaaattcctggcatcagcagcttgtagacaagctcctcaaccgtgaaccctgtgcttaactcttgtgtgactttccccacatcttcagtaaattctcagacagttagaggccactagctagggactagatacggttttgaatgtgtccttgaaaggttcatatgctggaagttggacccagtgtgaagatgttgagaactggtgggacttttgagaggtgggacctggctggaggtgattgatggtgatcttgcaaagagagggagttttgtgagagtgtattctattaaagtgggtctaccccatacagtaggcttattctgtatgtagctggttatttttatagttctctgtgtgttgtctgtaaaaaaaaaagtgtactttttgcctagatcatgcacatacatctttagaagtatgagattaagaaacctctttttaaagcaaagtatctaaccttaggttgtttgttacagaaataggaaatagtctatagcatcatactttaacatttagcttaagctgacactttaagaacctgcaaacctgattctccaaccaggttctttgtactttgtatgttcaccctcatgtgttcaagctatctctctgactcataacatttgcccctagggactgataaaatattaaattcttcctatcatatttgtcatttgcctttctgtttccattaccatgatatccattcagaaactttgtgtgtgctgtaggagtctcctaactcatgttttttttcttttttgtgtgtgtttgtaggtttttttgtgttttcttgtttgtgtgtaaggatgtgtgcatgtgtacacgcatgcatacatgtagatacaagggattgccattccccacattatttgttgaggtgaggtcccggtattgaaatccagagcttatcagttctactaacgtgtcctgggggccccttatcactgccttccctgtactgggattaaaggtgagccaccatgctctcctggtatttatgtgggtgttagagatttgaattctggaaacactttattcactgagccatctctctggcccctcaacatcatcttttggtagtgattcaaattattggaagaatagttgctttttgttttcctgtttaatagtatcccatggggacagtttatctgtattttcccataacagttatttatattgtttccaatttggggctataatatgaacaaagttgctgcaacatttttgcacaaccaattttataaactccagctttctttctcctgagtagacatttaggggtgaaattattcactaagagcctctgtaagacaagatctctgtctctgtctgtctttctttctctctgaaacacacatgcccctaatatcttgagctattatattatacagtctctgaaggcagggagatgccttatttctctatagagtccccacaagtcttaacagagtttcctaaacatgattgggaaacatctgaagattacccaactgcatatgaactcaaagctgtttgactttgtggtggtagaggaagtaagaaccccaaggacagaggtaatcggagagggcagtgactgacacatttcatactggagactcccttgaaaatttcttacctactcacaagttgttaccattctttgtcacctagagtgtggctaacaagagtgctgagcctagaggggatctgccacggtcaaggtgccccccaccccaagctcatggagttaatgattcgctttttcaagctaaggacatttccggagcttatgtttattgttataaaccactctccaactccatatgctgagatcatcacattatcattgccactggcagttactgatgcttctgtttgctagactccactcttgtatgcagtaatgtactccccacaaccctatggtcataacactcatttttcatatagtaaagatgagagacagagactagatcacatgacacatatcccactgctggctaatggtggtcctcatttaggctggctgacctagaatgtattgtgtaactgccgtagcaatctgcctaccataagtgacgtaatactcagaggaaactgtgtccagttccagtaagtgttagcttcttgcaccacagcctcattactacattctagttcctttttaacatagagcattttaaagctgctcatggctgcatcttacatctggatgtatggatgcatttcatttactggataagagcttttccttgtggtgtcaagtgctgagtccaagtcctgtgggtgattttccagttgttttaggtgaaagtagtagagtaaatatcatctgttaatagatgtgtgtttggatgagttgttacaacgagtgccccggggaactgaattagctctttagatgagctgtatgtgtctacaagcatttgcctttctcccttctgtggatagtgcttctgaaaacttaaaaatatctattcagagctccttggtgtaaaaataagtgaaaatatggctggggaggctcagctgatcggcagcaagaatggaaagctgggcatagtgctgcatgcctaccatctcagaagatggaatcagcagaaacatgagttcagtgccagcctgggctgtacatcaaagcatgtctcaaaaaggaaagaaaagaatcagagcagggatggtggttacagcatcataccctctcccccccccattgcttcaccttcagaccaacagttcatttctacactttcctggcaaacatcaggggtctcaaagcagcccaggcatgttcttgatgcttctgttgagagcttagtctttgagcacatggaaaaggacaggatttcttgcagccttctaagatgaagaggaccacagagctttaagtcattgtttttcatctttactccccctctgtgatatgatgatatgtccttgtcccttagcccagttcttgaagcttgaggactctattcccacctctactctctgtccagttgtaagaacattaccataggactagccatggcttctctcttttcttctgctacagcagcttggcttctgtgctttccttccctccaccatctcttaactagagctgcacccattgcaacttaggtgctctctcttatgggacaactttattcttattttctgatctctttaaataagaaaacttagagctgtaaatgtgtagaataaatgaaacccctgtctaaagatgctcctaaatgattttttttctccttacttcccagtgagttcttcatgccaggccttgttgatacacacatccacgctccccagtatgcctttgctggaagtaatgtagacctgccacttttggattggctgaccaagtacacctttcctacagaacaaaagttccagagcactgatcttgctgaagaagtctacaccagagttgtcgtgagtagtctgtgtgtgggtgttgtgtaatgttttatcatctattcaaacattcatttctaagaccaaactgcagtgataaaaaagttaaggttggggtggactgtgtcaacattcattttaagtcctttcattatccactagcttgccaccctcacagtgatgaggaaagaacatgagtgtaatgaccctagtctcagtctagtgggttctcctacagcactcttttattcttgtattctgggtgtgttctctcactgtagccaatgcatagtgctgttctgaggaccatatggaatatccatgtgacctttagaaggctctgtgactcactgtccccatctgtaaaactcagagataacgatagaacctacttgatggattgttatgacaattcatgaagttaatatttttgaggtcctttaaatagtgcctagcacatgtgtcttgtcattttttttaatcttcaaggaaacattaaatttcaaattacttttgggaggatatcacactattttagtaggtttttgaggagggaagacaggatggtcccacattgcagaacaggtgggaaagtgatgcaaggatggacggtgttagtgggaaaacactggagccaggtcagtccctgatcggtggccgctttgggtgtccactgtgtgttgatggctggaaaaaatgggccattttctcctttttcataaaaactagctccagaataagagcacacccagaaactggaaaaccataggcagtaaagaaggtagaacacaaatgcttttcatctggcctctggcctctgcctcctgccgtgaactctcattggatttactagtgttctggggcactggctacacaccttccaaacggaaatcagcctagccattccaccagtttcttgtcttgtattatctcagtctcaaagagtagaaactagtgcttacattctttcagttgtcttgctcatttataattgtgggacctatattttagcctgcatccacatgacactagaaaaactgagaagggctaaaagctggttatgaattggctagcacactgtgttaatgaattgtgttaaccacaccaaatctttatcttcaagatgtatttatacctcacattgttctaaaaagggtttgaaattgcttaaaattgcatagtatgaaacaaaaggaaatgagtcatcaaagcacagaaaaggaaaaggaggggatggagaaataaaacccaaagtcaacgcactctcttggtagagtctgtcataaattttgctctgtttctaccacatgatgtagacagggaagtcagaaatgaaattcacactgtgtgtgactttgagagtcacagttgttggaataaaagcatatctgttctttatactgaagttaaaagattaattctgacattgcttaatgtggatggatattatgctgtcaaaatacatttgtaaagatggttagtgttagaagagagaaaaggagaatgaaggagagggagagaggggggagaaaggaagggaaaattccactatatcagacctttacacttgaattatatatccttcagacagtgtctatacatatttcttcatcataaatgtaggtatttaaagtcagttagctcaaatggtctattcctgacaagtatttatttgtcagacatgccctatggttctggttatgagcaggcctacacatgctgacagagattaggatggagttgacctctgcttaagagagttggcattcctccttcatgccctcgcctcctctcccctgccctttcctcatttctccttccttctttgtgttctctctgtcttctcacttggctgtactttgcatagatttctgaatgtttgagtgtttttagttcattccagtcaaatatgaaagtacagcttctcatctagttcaagcttttcctcatgagaacccaggctggagggctttcctcataccatatcagcactgactgactgataagccttattataggatgcactttgtaaacaggccctggaatcactgtgagaacatattttctagccattcatttactctgggaaggaattgtcttcaggagctgtgggagtggcatgcctgggtgactgaggacaccggagatgagctagagctcctcttaaaccctacccgcttcttgatttggggggatttgtgccctttccacactcaccagtttctacagagagtgactcccctccgcagaggttaggaatgattgggtgacttctacagggagggggaagtgactgtatagactccagccagcgtcctgctagcacccccatgggtccaccctcttttcaaagtttccaggtccttctctgggttcttttctgcagttgtctcatcttgtgattttcttgggggttaaccctgttgctttcacttaccgttgtataagtgaaaaattgctaaggaaaaaagacagaatgatcatcgttctgccaggtggaagcagaagtctggctgaatacatttactttgccatacacagaaaaatcccatttgtacagtcacatataaataaaatccaagtatcctcacacaatccctaaggaacaaggagttaattggcaccacactttatgacctctgaaacacacaaccaggacatttaaagtaccaagttttccttaagctcacacttttagaatataaatacttttgccatttacttaggtctcttccacatcaagatggcatacctttaaataaacacattttaaaattaaaaagcagacttctattttcatctgtatgtgccatgtgacttttctgagcacatgcgattcaggatttttgtgatttatttttagaggagaacactaaagaatggtacaaccacggcttgctactttggaacaattcacactgactcatccctgatccttgcggaaattacaggtgagcagctgaaagcaggatttatgggcacatcaggcaaagacaaccagactatgcctggcaatagttcctacccagtaggaagccatgcctttgggtctagaatttaagcatttgcactttgtacttttgcaagtaactaagtgtccctgggaatatcctaagtgggcttttattgcttaaaggatttaatcatttctgtgtggattctggtcccaggatatgatgtttatagagttgaattttatatattgatttgtttttttaagagcacctttatcagtttatcagtgtatctgtggcaacagtttattgcattataattaacagatagatctgggtggttagctagagactcggggcattgcaccaacacagtgttagtttagtaacacctgtgattctgttgctaggtaccaagcaatatacaaaacaccccactctaaatagccttctgatatctattgatgccctcatagcacagacagattaactaaagctcagagatatccacatgtctaagacctcagaactgggaaacaaaatggagactggatttagcgtgatgattccacacatacccagcacagtgcctaacacacacacacacacacacacacacacacacacacacacacacaacacacacacacacagagagagagagagagagagagagagagagagagagagagagagattgtaaaacagccccacctgcacagttgaactgagtgagggttcctgcagcacctctgctgaaggtcctccattgccagcagctgataggcattcagccaatgataaagataccgatgctgctacagtcaggaagagcaatgacacgtcatctgagcactgtgagcctccttctttgtgtatttcttacaatcctacacagagcagaggactctgggacactggagtctagatctcagatgatagctgccattttggagtaatcccagggggaaaaggaatcaaatccaagtcgaccacccaccatgcatattcttaacatttcatatgctaccctttatccacaaagggtcatgacatgcatggagaggatctagatcccggatggcaggagagcaacagatgggagaggaatgagtgggggggaaagagaaaaattggtatattgaggatatgaatatattttctaggatctgaggtattctcctcttgtatcatgagagaaaatgagtgccaagatagttgtgacattggtagaaatgtagacaaagtgtataatcaaaaggaaaaggtaaataagaattataagatatccagttattttctgacaggtttggagtgggcttgtggctgggtggaagccatttactattctttgaatttagtggttttgtggctgtcacagtgtgaagacagagagatgattctttacagtctcatttttttaaaggataattttaatctgaaagtgtttttagactccacagaaaaagtatgtgttaaaaaagaaacacatcttcagattctttctctgtgtgcctcacagataaatttggacagagagcatttgtgggcaaagtgtgcatggacttgaatgacaccgttcccgaatacaaggaaaccaccgaggagtcggtcaaggagacagagaggtaatgtggctggagctttcatctgtggggatgagtcatctgctactctgatggcatttgaaacagagaggaaagctgacaccattaagacccagttgggatatgagcgtggtgacagactgttctgattgttacagtatgcagttagtccaaatactcaaacttgtgacagtggtcagttggtgactcacagagctttcctgtgtagaccattcttgactctcatagaaagttccccaaggtgtctttttttatgataagaaaactgagcctgacattgcctgggggacttgcccatagccattggagtagtccatttaccattactctgatataacatcagagataatcaacttaaagagagaaaaggtgtctttggggttattgttatagaggttccagtaaatgatctggtggccacatgactttgatgaggcaggagtgaatataggatacactgctcacctcatgagccaggaaggacaatcagagagagaaaactggccagaattctaaatgcctctctgggaatatgccctgagatcttctagcaggctccatccacttcctaagatatcccactccccattaacacaaacctggacaccaagctttggcacggggacctttgtgggacactcatccaaaccattttattagtgtagattaatgtgtcagagccagggtttaatagggtgaaaaatctctgacttaaaatgtaggcttcctgatagcatgacatggtcctcactcatgccatacttagtgtgagaggcaggaggcatgtacaagcagttcttattcatgcacatgatcaagaataatggtgtgagggatcactagcagaaaatatatgagaggttatggaaaattttccatttatagatgagtgaaagacatttcagtataaatgattcaggcatagtggtacacacctgcaatccaagtatgtgggagacagagaaggaaggatggtgagttctaagccagccttagccacatagtaagacactctttaaaaaactgaaacaaaagtattttttttaaaaaaataacaaaaaatttatgcttccctggcataaagcatagagaagcacaaagaggtacaaaacagagacattttctttagctaagccatccaaagacaccaatgtgagattttaccctatattgtttcggttggatttaaaaaaatgttttattgattctttgtggtttttacatcatgcacccagatcccactcatctccccatcctatcacctccaccctctgtccttataaccttccccccaaaacaaaacaaaatttaaactacagcccagaaacaaaacaaaacagaaaattttggcatggaagctgtagtatggcccagtgagtcacacagtgtaccccttagccatacaaatttacttctaagtgtgctttacattgggtcaatgtgttgtaaccacctagcactaactatccttttatcttgccatagaaagagaaaaaagatcttcatgcattctggaatcaccacaacatatttcaaatacagaactagaatatctcctctccagaactgttacatgaggaagtgacacacagacacagcaggaaagctgtgttccttatatgccctcagtccacatttgtggacttgtgggaaattaaccctttacaataaaaggtctacacactttcaacagtgacacacaggcaagagagacactgaatggtagagactaaggcctgctcgagagccactaggtatagagtgagttcaccagaggatgtgaatagcctattttggggtgatctgtacctcaaaggatagagaaccgtgtgcagacagaaatgtcaaaacatggcatggacagagacaacacaacaggtccacatgaagtttctaatgtgactggtcctcaagccacaactcacagatgccaaatacacagcaggcaccctgggcacacctatgtcagtctcaggacaggactccaagaaatctgcttgcaagtgtagggatactcaatgctattctccaagttcagtatagtaggcctatcaatgactcacagaaaggcagcaggggagaatagaagcctaggatcccaggcaggctagtttgcaaggctcagcagagctgccagggctgagtggagtctcatctaatcacgccctacattgcaccacagtggggaacgctgcaaacacaccccagctgaggttttattccaggtggacacttagctcactgaattaaagaattgcaggatagggctagagagatggctcaggcatgcagggtttggttttggttccctgtacacccatggctgtgcccatatctgtaactccagtcccagggaatccaacgctttctgatctccacaggcaccacatacagaaggcatatacacacatggaataaaactaacaaaagaactgcaaggtctcctgttcagagaggaaccatgatgagcccagcttaagtgtccagtccctctggtctccaggtgtcagagttgcaagaaagagacacagggcaatgtcaccgaggctatcaaaggacatcccacacctgacatgtcaactgaatggtgtgtggatgcaggaaatgtggtatacaaaatgcatcagctatgggcaaaaacaaagtgctaacaacatgatgaactttaaaattactgttctaagaaaaacagactgaacacaaacgggaacacattgtaaactttcatttatattgagtattatagaaactgcaagtccacgagacaaagtgagaggtttgccatgctgaggaggagggtgacactgcctatctccttcctataaacccaggggatcttactctggtgatgggaattcaaagactgtattatttcggtaattccacaacccagtaaattggctacaattattgaatagagcacttaaaatgggtaaactttatgatatgtaaattatccttcaccaaaaactcttttgaaaaatggatatatgttccagtgcacaatctctttaagagtcaggtaggaaaggttagatttttttaagtgcataattttgaagggttgcttttaaattcacaggaaagtgattcttgacaaagacattaagaggatatagtagagcagattccagattcccagactatgtgactcttgcatacctcagtgtttctttcagcccttctagcaccatttttgcctctacacagctgaagcaattctcttaaagtccaagaatctcaggatgtattggcacattgtagagtctccttaggatatagaattaaagttgaaaaacagattaagcccctcttctaatctgccaaggtcactaagtggatttagcccattttgtaaaattggtatgttcctttaaaaatgtatatttgcatgttttcgagtgtgtgtgtgcgcgcgcgtgcgtgcgtgcgtgcgtgtgtgtgtgtgtgtgtgtgtgtgtgtactaggatcatgtactagttcacacatatagaggccagaggaggatgttgcctgtcctgctctgccactttgcacctattcccttgagacagggtctctcactgaactgcaagtttttagctcagttgaaactcccagcatgcccctggctctgaccccaacactggagttagaggcatagagagttttctttttctttctttttttttttttaaatcggtactgggaaatcaggttcaggtctttgcgcttgcatagcaagtgctcctgcccgctgcagtatctccccaggcccaggcatgaaggattctttattttaaaaatttacccttagtatcccatattaggatagggtttctccaggagattgggtttgttaagtatgatgccatgctcattaaattacttttacaatattaattgcacaaaatagtagcttccattgtggcatttttatatgtgcatgtgaaatactcggatcatatctccagctcctcagtagcttttgattatggtcatttcatgagttttcattatgttcaggtgcatataacattggtggaatttattgatcattgaagtacttttcttacatgatctttaatggctttcccaaggtatcttgaatatttaagaaggtgtttcactgtattatatttcacatcaagagatacacagaagaaatttctttagatttgttcttttggggcataagtttggatctcggctttgcttctattttctgggattttctcacttcaagtatgtttcctctgaagtgctgaggtgagaggctgctgcatggtcacaggaagagggttacacctctgatcttcagcactggccattataatcagctcatgcacaagtcactactgtggtcactctaattcacaatttgtttccctggggctgaagatagagcccagggctttgttcatgcctggcaagtatctatcacagagctacattcccaggctctcgattcacactttagtctgaaagagtaccagaaggaagaaaaccaataactaacaagtctttaccagccagggcaggaataaccattttgtaggacgcttgccactgttcgagtaggcgtaagtgctaggttcaccacttgtcccattccacacacacttcctagccacctctgtcatagtattccaccttcctccaatacctacttcccaccagactttgtcctcagagactgatggtgatactgtgggcatgattggcttccacataagaggggactagaacaagtgtctaaggctcctaagtgcttgtgtgtgtcctagtgttcatggtcctatcatccacagaacacagtgcactgtaactcaattacacataattggagctgctagcacaggatgtgtggatgctcagaaaggaccacaagatgccacaggacaatattgcctgtgattttcctcttcctcttttgctatcaaaggaaaagtggagtaattattgcttgttaatctctgattagtggtagtgaaacccacactgttaggtatgttttcatggaaatcagggcgttgtaaggatctcattttcaccccgttgaaacatttgtttgaaaatgattgactttgctaactttccgtttgtcacttcattgcagattcgtgtcagaaatgcttcagaggaacgtaagtgaatttgttcagttttcacccagagtgccgctttgttagctgtagcatctgacaagttgtttcatgccttagtctgtgtacctatggcttagtctatacttaagaggtattttcctagagccttcaattgttgacacagtgtacccaggggctcggctcagggaggtcagattttttaaaattgaaaacatctgacaaagactgtgagtcctgaggtgtggagtgtgatagcttcttgcacatatgcagtgtcggatgatggtccagtgagatccattcacatatgcaatgacaggactgcacaaaagccttaggtatcttttcattttataactgagaacgtgtgccctttgatcaatatcgcctcatatgatccagagatcccatttctgagtatctatccaaggaaataaaatgggctatattggagagatactacatttactgcagctttattcactatagtctcaaatatggaaagaacctagaagtctatggatgaataggtaaagaaaaccaattttattcatttttacattaaacatgtatacaggagaattatacatacatgtttgtatatacatatatgtatacaagtgggggtatatatatatatatatatttatatatatatatatatatataacctaaatatgtctcctatatcccatgagtatgtatatatacacatatgcatttatagtgggatactattcattcataaaaagatcttgctatttgagacagcatagatgaatctgcaatatattatgttaaattaaatgaattcagaagagaaatactgcatgctctcatttgtatgtgcaatctgaaaaggtcaaattcatagaaacttctggcttttgctttccagttgaaggctcataggacactatatttagaccttttttaaaagtagttttatagtcaggaacaatgatctgattttggtggatttgattattcactattaaaatttgattattcactttatgtctactgaatttgtttatggctccagggatattgtgtgtacccttttgtttttggttcctgtaccccttgtctgtatgtagcacagatcccaagtttagtcaggtatgtgaattccatcccaagttcactaagcttgtggttagtttaaggtgtgttgctcagctgtctgtcacagtaacaaaatactaagaaaggaagggttgcttagactcacagtttcagacagttttagtctatgatcacttggtctggtggcttttaggcctatggttgttaggtagagcatgatggcagaaatcccagtcagagggaagcagcctacctcatggctgccaggaagccacagactactttcttccagttgtctctaccttccaaaggttctgtcacctcctaatagcactattaggcaagaacctttacccaacatgagtttggggagaatttaaaatacaaacggtcatttaaggtgtgacaatccagtcatcgtcctcaaaagtcaccttctgaactcacctcacccattcttatgtcatttcttctccttggtctggggccttttaattttgtgacattggtctctgcagagggtgaattgctctgtgatccgaagaggtgggtggcatgtggacattgaggacctacttgctgccttcttttttggttctgtccactgcttgtgtggatcgagaagcaggctatatactcagactcagtgccctggctacagggtgccttgctctgtaaacgtgtggcacgtgaggcccatacatagccagccaggcatctgctttgccctggcattctggggttcatgaagacattgctatttattgcctccaagcacatcgtgaaactggtttatggctccaggggacaggctcacaagttggtcagcctagcccttgcttcccttatgactcttcgctgtcacactggaagccataggaatgttcagaatttattgcagttcacccctggtgagttatagataatgcttatagaccctcttccttactccctctaggggtcattatatcctgccagccaatctctgatgtattaccaaagagctctgagtgaggatgcagcctgcacacctcctcaagatgtaggcagggaaaccagccaccacttcccatgtagtgtccccaccccaggtctcatctgaggtaatgagaagggaatgcctgtttcagagatagaactttcctctgggaagttggcgctgaagaaagtactgttctcagtcatgagttgtcttttggaacctagaacctctgtctactcaaaattggagatgttcctcaatattgaaactgtaaaatcacattgttgtggaatgtgctttgtgctcataatctccatattttcctcatgaatttcttttattatttccagtactcaagggtgaaacccatagtgaccccacgcttttccctttcttgcacggagaccctgatgagtaaacttggcaacattgctaagacccatgacttgcacattcaggtaggcacttttctttggtttgtgcttctgtctatgcctgaaagatctcttagtatccccaggtcatctctaataatctgtagttcatctactgagatctcctagagtcaaagaatttcaggacaggaggcgccctgactaacgtcaccaggaagcaccgactgaagccacctaacccagtctgtcagttttgcaggtcaggtgcctgaagcttttttcatcctccatattctctgatctgtcttagacagtccaagacagctttagaaagaatagcaaggtcaatgtcatactacccattcctgataaaacacatttccttagtgcttttatttgatgctttcctggtgttttagaccttcatttgtggaggaaccaattattatttgaaaagtaaaaagaacttaatttctaccttacaaacgtgcatttaaaatccttttgttctgagtttcttaatttaaaaccaggaacaaaaagtatatcttcctttatcattaagttgttgcaatttagcaataaaatgcttttaaaatctcacagctgggttaaaattaggagcccccctcccccactcaagcttaattacacactgcactaaaatttcccctctttcagagctgatggtcttaaagggaagggaaagttggggtaaaggcagcatattgattccttacttttatttatttatttatttttaaaatgtatgttcataggacctattagcgtgtcttcctcgtgattattgtttgtggcttctgatatttggaatttggattcagtcccccacaattatgctctggtaataaaattccaaatttggataatatttccactttggaaacagtatgttttattctaaaagaagaagaagaagaagaagaagaagaagaagaagaagaagaagaagaagaagaagaagaagaagaagaagaagaagaaaagagagagaaagaaagatgcagacaacataaaaaacctacatgaaaataaattgaataagacatgaagaagtctctccttcgtctggggatgcagtgcagttgacaaagtgcttgcctggcatgcacaaaaccctgaggctgatcccaggcatagcctgggtactggggacacagcagtcagaaggaagaatcagaagtgcaaggttatcccttgttagcaatctagttcacagacattttggcaaacaggagaccagctctgattagagggatggaagataggcatttaattttactatccaatcaatcaccaggttgttcttcctcttgggctacatccatgcatctcactgatagactgggatttactccccgaccatgggtagagtccgatgtaggtgcagcactggttgggatcattactcactttttcttttgttcatctttctatgtttcttcttagcacagaaaaagaggcctggcagaattggttagctagtgtttgttgactcatgaattgttcccattatctactttcatcacccctgaaatgtttttttctagaggcttgggtggctactccagtgcaaggtactttttgtcccctcagatttcaggtgcccccatgaaaggttggtgtggctgtctactcacttggtttgtgtgtggattcccatgagtgcctggtgaaggctctgtcattttcatattcttttctgcaaaagcatcattcagaaagccgagaaaagaggcagactgaggacagatcctgagcccagccttccatctgcttccagtatactaggttctgtaaaatttcacacctgaaatatgactaacacatctgcataagagatggaaaatgacttacctaagccaacacttttattggctgatgagaaatggaagcttaggaagagaactggcttgctctattaggctctctgttcaaattttagtttttttttttttttttttcctgagtgaaccatagattcatcttccaatggccattgaattcttataggatgctgcaagcaaggcactgggcactctttaaaagagggcataggttgttcctgctatagataaaggtcttgagggaaagaccccccccacacacacacacacatacacacacagagccatgctcaggatatccagtttctttgtcatgtgtattatcatagaggatgcattataattactgaaaattaaacctgagcaagtagagacttcaatgttttcctccaagtcgcctacatcagcaagttcagcaagtagaaactagcagcagcatattgagataggagatagaatgtcaaatattttacagaaaaagtgaaaccattctttctttgtttgcagagccatgtaagtgaaaatcgtgaagaagttgaagctgtgaaaagcttattccctgattacaaaaactacacagatgtctatgataaaaataatctcctgacaaacaaggtaagctcagtatcatgatataatctatataaagcaggctgcatcctttaagtttcaaaatctcagaagtaatcacagttcttcaggacacatgcacttttcaaactagaataaacccagtgtgtgtgtgtgtgtgtgtgtgtgtgtgtgtgtgtgtatgtgtagatatatgtgtgtgtctatgtgtgtgtgtgtgtgtgtttgcatgcatatgtgtatagatatatgtgtgtatatctacatgtgtgtgtgcttgtgtgcatgtgtatgtagatatgtgtgtgtcaatatgtgtgtgccatgatatgtgtgtatccatctatctgtgtgtgtgtgtgtgtgtgtgtgtgtgtgtgtgtgtgtgtgtgtgtgtgttaatatgggcctgatgtttcatcctccgcttcattcttaaactcctaacaactttttccattgctaattggtgagagagtgagtgcgtatttttttccaatgatgctttcatagttagtaggtcagtgggcttttcttcgagccggcagatccatttccaaggataattctttaaagagtgtacaaatagatgcattgataacacaggaaagtttgaaaataactatccccaaggaattggttaaatcatagaatttacattattagaattctatccagcattcacagagcaaaatgtgcatgcttccacagaagaatgctcaaaacagttggatatgcatgtacatatgtcttggtgtgtttttacacataaaaaacgttcagagatatacagtgaatgttaaaagtaagattttaaactctgaggtttagaaaaatgcatatgtattacttctataattaattaaaattattgtgagtagcaagagacctcattaaagcagtataccctttggccttggccttccatgaaatgaacacactgctttgagagtttactgcaacaagcaatttcttagtgactacacaaaaggagatatgaatgtaagtgatttgaaaggttagtactttgcataaataatgtaaatttacatgggaagctttatcttcctttacatatattaccatatgattaataaattaaccttaaattttcgtgttaattatatttgcatggaggttgaaaaagttctattttaataatagtttttgcctattgaattatgcctcccaaaggagaaagcaactgggtatcagttttatattaaagtaaaaagaaactttttagagaattaaatgttccttgaaaacccacaaatcttaccaacatgagaatttagagaggtttcaaatgtgtggcacctgctttcataaataaagtttgcctccttatggaaaagttattatgatatgacatatcctgattttatgtccatgtcaagatccattggtgactataatgaaactagtaacagaaataaaggacaattctctcagatgtggtggcttatgccaaaaaaaaaaaaaataccagcattccagaggctgaggcaggaaaattatgagtgtgagatcagtttgggctgagttcaaggccagctttagctatatagatagatatcatttctaaaacaaaccatccgtaacaattaacccatagttctttacaaaatcatatttgcaccttctacgttctcttagaaagtcctgattggaatgcagacaagtatcagcctactggaagtgcatcatacagatttagaaaagaggatatttgaaaattttctgtagtagagatgataaaatcgtaataaggtattcagtctggttggatttcctatgctgcggatgagctggctgaccctgtactgaattgcaaatcagccaaaataatcaaaatcaagagccagggctaggatggagttcagtggtagaatactgggcttgattaccaacactactaagatagataaacagacagacagataaaacatacaaatttgttgagaattttgtgatgtacatttggatacaggaattttgtcctttcaaataatagcaactgctttgcaaagaccattgtagccaagccattgcttctgtatctccttgtagtacatagccatgggtattattagtacaagcagtttttagtggtaaactccatgctggtcattcttctctttagacagtcatggcacatggctgctacctttctgaagaagagctcaacatcttcagcgaacgaggagcgtccattgcacattgtcccaactctaacttatcgtaagtagacaataattgcttggcaggttattgatgtgtagtgtggataggcattttctgttttctccgttgtttcttctcctaggatctgtttctatagttggtttgaatagggaaggaacccggtagatggatgctcacctgtgctaaggtgaagaaagaagacatttgaaagggggcattgttgcagggcatacatttaaagatttccacatgcaccagggggaaatagaacagagtttaaaatcaatagcattcaggttttacagctgagaacagactgaaaaaaaatgcatgtcccagggagacagtctgctctagagtttagaagggagttgcggctcaattgcacttggacatgctgctgaatgtattgagacacagctcatataggagaaccttggagggacttcatcctatttaattcccaaatacaaaagctttatttgaaacatgtcctcttttttgttgttattgttgttgttgtcattttgttcttcttgttgtttttcaagacaaggtttctctgtgtaatagctctggttgtcccggaactcactcttgtagaccaggctggccttggactcacaaagatacacctgtaaaggtgtgtgtcactacctggtgtccttacctttcttaaaggttataaattcatgaatgagtcagttgaaagttatggcttgcatcttcagtgaaacaaaaaggcccatagacataaaaatgttgtgtctaagtttagggaagttgtggataaggagatctagtccatagatgctgggttagaaattcagagttgtagaaaatagtgtatttgggtgggggttgatcttagagagtgctactagggagtccagcacacagggaagaagtcaataacatcaaaccagttaaccacagttggatcctggagttgtccatctcaagaagtgatggcacagggacagtaacactgaacagtgacagaaggcctgggtgactgtggaggagcacctcttctgaccccccaacaagaacagagcagcctctagaagtgggtagaacatctcagcaaagagatgaaggtattagcaagcttacgaactttgtgaaggacacagatgtgtgtccatgacaatgtcagaagggctcctagagatacaggacatttttctagccgttttaaaggtctcagaagaccctgcattttcaaatgggaagtaaatgtacaaacattggtgactttcattatagctgagggacaagaatttaacatcccctggatgaacagtaaaatatcctctaaattaaaacacgatcgggcttttcaaataaatgctgatcttcaagagttttccttgtgcacactggggctttggaagttatagtttagtgcacttttttgagcatagccatttggccactgtatcctcttgggcttctaattacatgctttagctttcctttgatcaaatgggatgaagatgacaaggttcaaagttcaggccaggaactctctctactagttgctatcccaggaagcagcatttgaactatcaggcccccatttcaatggcttccatcctctttagttgtatcattattgatcctgtaaacacaggggaagaaaaacatgatggaagattacctttccttatctgtcataaagtcatcaccaaccttctacaataagacacatcaatgaaagaaaagcacagccaatgtgcttactcagagtttatgtgaccagatcattaaatgaagaccaatgggcacagacagctctcctctatttttatgctttgctgtgatggagcatggcaaccacacagaagtgtaattagacaaagaggttttaatctaatgccaagttatcaagttgggatactggagagagggcatcttcagatcttcttggtccctgtgtcatattgttttccttctgtgaatggggcaggacctcttccaaaatagaatcatatgactgtctatcaaacaaagtatgtctgagaactccttcctggccagcatgagacacaaggaaggaggattagaacaatctccttagggtttgtggcttgcatagggaaaaaggatggaaactttagttgttttgttgttgttggagatgaacctggggccctatatattcttaaataagcactctaccactgagttagaccatagccctgagaaattctggcttgtgtggtttggagacttgggggaggaggtcagtgagattttttaggctgcttctgaggcccaaagcatcatacactgggctattatttttgttccctaatacaaattacttctttgggtaatacattgttctggatatatcagagtgagatgcattgtaatttatgttttctattatagtaggaggagttggctaggtaggaagtgtatagctttattagatttacagatgaactacaaagtgtaattcttcggtgttttccatgtagtcctttgctgctttgcacctcctcgaagaagtgacctcatgccaggaagcaagaaacagatttttatgatcttctctactccaccactttcttggcctggtctgactgactgttgaccttagggctaataaagatgaggatccatttctttttttttttttttaatgtgactgccatctttgacagtgtccatatattgttaaatcaccagatcgccttgttcttgcatcttctttctctccaggctgagcagtggcttactgaatgtgcttgaagtcctgaagaataaagtgaagatagggctggggacaggtaagcagcctccatctggagctgaactgatgaataactgttctgatgtagctgaattgtaggtatggggtctctgaggcatgtgagctttattggttgctagggatgggtgtcttaataataaacagcaaccaaatagagttctgaagtctttatccccacccccaaagccattttccctgttcattgtttagaaactgggcgcccatgtctagtagctcacagctgactgttccagctccagggtacctaacaccttctggtttacacaagctcttgcactcacatgtgccaacagctcacacacagacatatgagacattaaaaacacaaattcttaaggaaggaaggaaataggaaattattcttgctgaaaattcagtcagtgatgtagagaataaaactgagaaagaaagaacacgtgaatgtcacaggatggtgtggaggccagacactgagcaaagagcatgagggaaggctgaaagtgtggtactatgactgacttcctggctcatgagaagctgggatatagtaggtcatagtcagagcctgggaaagagcagtgttaagagagcttacactctgtgtgctaaatcataaccaaccattgtgatcagctattttaatttcaagaaaaataaaaatgctccaaaagctttgaatctgggaataaaatgttaccaccaaacaactaaaagccattttctttcagatgattgtttcgttggtgatggtgcaaataataccaaaggcaaaagaattattaatcaaaaatactattcatatatcaggtcatctctcattcatgtgtaaaagcaacaaacttctcaactatataaagacttggaaaaaattcttcttttgaccccattgtaaagagttacttgaaagtctcttttattagtgatgtgtcaaaatgaagggtcattatataggggtgtttgtacagctgggaagtgagaggaagctggtaccagccaagcaccaagttacaggaagacaaggtcgcatgtcttcccacatttggaaataaacaagcaaggatggcctgagaatagaaaacagacgcaagaagacaaggtcacgtatcttcccacatttatctggaaacaaacaaatgaataaacaaaaaccaaggatgccctgagagtataaaacagactctctgggtctgggaaagggatcttgaggacagggaaggtgggggaaaaaagggacgagggacacgatcaaagattgataagatatatgcatgtatagaattgccacagagaaatccattcatttgtacaatcaatatatgccaacaataataacaaaaaatcagtaaccagagcaggtgacacacctctgctcaaattgaggtttgagcagtcagattgagaacagtgacagcgacagggaatctagagcagtagatttgtatcaagagtgctgctaaagcttcttgaataaattattttagaagtcgtaaaaagaaatggttaacaacgttaagagtaactcatggtaagtcaaaaagacttttcctttggtggaaacacatgataattgtttttgaaactgaacactagattgttgagttttgatttgtactccttacgttgtttgtatgtttttaaatatattacaaaaattttaagtgatgtatgcttcataaggaatagatatttaggggaatggacataggtcttcatctggaattcatttatgattcatacatacagactgaggcaattttatagtgtattttaaaattgtcacatgtgtcacatgacagcagatgtgaaattttctagtatgttgtcacctgcatttgggatttcagaattttggatatagaatgattatcctatataaataaaactacctgaagaattatgaaaatgggactcctcccctctgaaatatgaagaaaaaggcaaaataaacattgaagaagacccaagaaataacctgaagggaaagttgaaatatataaaataaatacatatagcatgatgtacaagtttgttaaaatgatgtacatggagccactgtcccacttgccaggattgtgccatcactccgtgggatggctagtttttctttatttggcacaagctagagtaatctgggataggggaacttcaactgagaaattacatccatgagattggcctgtagagaagtctgtggggcattttcttaattaatgattgatgtgggagggctctggacaccgtgggcagtacatccttgggcaagtggtccagggttgtataagaaagaaaactgagcaagctgaggggaagaagccaggaggcaacattcctccatgtttctgtgttagttcctgtctccaggttcctgcccggtggtcctgccttggcttcccttgataatggactgagacctgtgagccaaataagccctcttatcccaaaggcgcttttgccacagtttttattacagcaatagaaacctaactataacactccctgagcaacagcctttggtcttcttgtggactttggtcttgtaatgccttgttttctccatccttcctgccttcctaaagcaggtctcttggatgccaacagatattgcagtatctcgtcttcattttgtatgtgttcactttgaaaaagcccagaactagatgacctcaacagttcccttttctatgcctgcagctgtgtgtttaggagtagctggagacaaccgtgcatttcatgttaaattttgtgctcaaattccaagaagccctcaacactggcagcagagataattatatttctctactaagtatctggctccttaatccaagatgggtttctatccctcttgattctgctaaaacattctattgcagctcaagccctccattcccagcacatagcctcttcttgtaggtcatcacaaggatgtaaaaataaatcagaaatctttgtttcagtttccatcaccaaatttacatacgctctttcccatcattatgtgctgtctactggactatccctaccaatacacaaccatctaaactgtctcctgacacttttaggtcataatatgtaactgttctcttaccctgacacccccatcagcttcctgtcccacattgtgcctttcttcacagcaaaacttctcagagtgtggacatccacacagctcctgatctcccctgccccccagtcctgattcctgtccagtcagcaaggcagccatcttgtttcttgatatgacctgctgccatgatctctttgctgcctctcaaaagatgccattctgttgtgactgaatgcctctgtggtctgctgtagttgacacttctcctggtcctaatagcttacatgggaatcagcaaaattgcattaaaattttgttcttcctctgctgctggccattctttcttctctgaaagcttgctctcttcttcctggctgtttggaaagctgtctccaaagctcaataagtcaatatttttttgtacttcagattttcccctcttaagggtttttgtcatcaactatggcttcatatgcctattagcttttatgtgtaggtcaactccactaacaaaaagtccccaagaaaaacttgacaaatctcatgtttgagagcctctgttgttagcaactttatgaattatcaaattgctaatatctggtgtggcatggtaccttggtttaatagcaagttattttgtccattgaccttgatatttttgtctctaaaatggagttgatactagcagataccttacatgtttgtgtggaggactggttaaatcaatgttgtgttgttcttatactgattcttggtatgatacaacactagtttgtgacaattggctatttggcaatgctttttaattttataattatttcacttctttttaattaacatgaaatagttatacacaaaaggcttaatgggtgcttgttatttatttgtgtgtatccaagtgtttgtgcttatagtgtatgtttgtgtgtgtgtgtgtgtgtgtgtgtgtgtgtgcatttgttaacatgtgtatatagagaccagaggttaacctcaggtatctttccttaggtgctgtgatagggtctttgaatgggacctgaggcttgccagttaagccgcatgagccctaactgtgtctctgcctttccaatatgccaacattctcagctttttacataggtcttgtggatcaaacacaggccctaatgcttgtgtgacaaacactttactgactgagctgtctccccagcccagattattttctattaacacagactaataacttaagtagctgtgataaaacttttcagggaaccagatgatcctctagcaacactgttctagataaagaaaagtactctaccaaaaaaaaaaaaaaaaacccaaaacatacaagtttatctaagggaatacaagacagttgaccataaaactcagctgtaattcagaattgcaactaaataaccaattacttttgataattgtaatatttataggcactaaataatcatataagcctaccagaaatgatggggacatttaaaactacaatggatatttgattagttataaaatgtattctccaataaagcatgctgccttgcttgacattatatcaacttgtttcataaaatgcatttgtttctgccaaaggcagtgtttcaattcattatgactaggggcttaagctaagtcactaaaactctcatttctcattcagtgatgccaaccagtatggaaagctgtccttatcagccttagttatttattgtactaagtttctaaaacttagtacaatgaacttatgttcattctaaaactttctgaagaattattgttttaaaaaatgcctttttaattttctaaacttttcatctagattggaataacactcagacattttcttaaatgtatgccaattgtgagtttatgttaaatcacattataaacctatcacagccatatttgagtaatttctgtgagtgttcaagaaatagaatatatctctttattagccatgaggatattatagtgggttgagttgtagtcccccaaagaagtctactagagcctgtaactatggccatattaggactaaaggtttctgtagatagaattcaggtaaagctggcaagattaactcattctgaaatggggtggctcccaagttcaatgatcaatgcttataaaggacagtaaaggaaggcacaaagacccaagagaaggcgatgtgaatgtggacaagaaactggagttactgccataagcccgggtctccatgaggcatgagaagctggaaggaacaaatcaggattcttcccgaagggttggggtccttgctgacactttcagtggtgctagggtctgacacgctggccttgtacagtttcagcacacactctgtctctgagctatactccccagtcagccctgccgacacatggattttagacatctgactgccaaaactatgagagaagccatgtctattgtgttaagtcacaagacttgtgatgttttaagcaatcctagaagctatttctggaatagattagattttaacgaaaggtggtttttaaaaatcagcatgcaaagtaatagattttgttagagcattttgatatgtgtattgtcatttactttgttctcatttgtgccccttgtcatgcttccttcttgtttgtccctttccttcctgtaaatagtgaccacttctgcttttattcaaatgacaaaatatgaattgatttaaatattggcttatagttatgtttacagatgagaaaacttttagaaaatgaaaaatacaatgtcattaaaaccagaggaagaaaacaacatatacacctgttattctacccatcttcataaagctactgtgggggctttgtctttcctaccacagatgtggctggtggttactcctattccatgcttgatgccatcagaagagcagtgatggtttccaatgtcctcttaattaataaggtgaatgagaaaagcctcaccctcaaagaagtcttcagactagccacccttggaggaagccaaggtaatgactagtttcttcctctctcacgtcatgtacagccatgccaatttgtgtcttttgcaccatagtgaactaaggcaaatcctatattaatgactgatatatgtcatataacatacccaaagcacagccatgtagtaaaacaatgagcattgacctcagtgacttcaatgacctcaatgtctttctcagaatacaagctttaaagagatgtcaatcaaacagcatcgctggcagcaaaacccaatatcttcacattctttaatatgttataagaatgagacatgttctcccttggcatccagtgaccacggacatgagttacagctgtaagacaggagaagtcagtagacattattggcctgtgccctattttagaaaagcactcttcatgggcaacctgaagttacagagtgacttcctttcaaaattgctgcctctcttgagtgacagggtctctggactttgaaaaggaatatatatatatatatatatatatatatatatatatatatatataatctaaatatactaaaactcacactaaagaattcatgatgaaaaaagaaagaattcatgatgagtatgcctgtattagaaagtttgcatagatttttgtgttaatttgaggttcagttcatgcaatgaaaataaataccactaaccatttcacagaacaaaaaggcaaagctaggagtgttggggaagaggaggaaaggatgaagtagatagatttgtgacacgcttgttactttgagggttcagtggagtacactgacagctgaaactgagatgtcatcagcagtggtgatgaatggagctacttgcttcctgctccctactttctatacagaggtcatgtgacctgttggagtgagaggacttctctacttcactgttcagatactacctttggagggtctagttacatgttggctgagtctgtccttgcaaacaaggatatcacaatgattcagtggtaattctgattgctattcacttccatttgtagccctggggctggatagtgcgattggaaactttgaagttggcaaggaatttgatgccctcttgatcaaccccaaagcatcagactctcccattgatctgttttatggggattttgttggtgatatttctgaggtaagtaaaaggaagttaaatgaaatgccttttgtcttttttgtttttttgggggggggcatctatttttaaaacaatcattattaaagtaagctatattcactttgttcatttgtaagaaatgcccttatgtttttaaaaattattttgttttattattagagtaggtttctgagaaataggcttcatctcattcatttagtcattttttcctgttttgcaactttagaaatatttgcatcatttttatattgattgatttatttaatactctgcatttaacaatgtcaagattgtttgtcaagaatattccagtaataggcagggcatggtggagcacacctttaatcccagcactaaggagacaaaggcaggaatatctccttgagtttgaggccagcctggtctacatattccaagactatgaggagacaccctgtttcaaaagccaataaataaataatattctagtaaggataaacatttgttaatagctagtagactgtgatttttttttgtttgcttgcttttggcttaggtttccatttatttatttgtttttggaaagaccatttttattaaaatgtaaaatgtcattaagaaataaattttaatttctggagtctgtcagtaacatttccatgtatatttcatttttaaatgtaccaagtattatttcttaacacttttgttttctattttaggccgttatccagaagttcctctatctaggtatgtagctatgtttctgggctataaatacaattttttcttggtcaagactctctgttcttggtacattatgttaaactctatgaatgttacactgtgataatcatttttaaacagttctcagcactgagcttgcactatggcacaatgtctaacaattccccaagaacacacttaagtcctgagctgggacatagaggggaagatagctccatgccaagccctcctatgtcccttctgtgtccctaacctttctattctgggacagaactgaattcatggtcagagttctattcctggagacataattgaaccaggagagtctaagagtagcctcccttcccattgtgtgagttcagtgctgggtgaatttgagctttgagagggcacaatctatagactgcttatcttaatgtgcttaacacagagataggggtttattgatcattgattgatttccacctcagacacataatggagaccccaattcacaatgagctatgatgtcatctcttgatcaagtcatccaaggagattataaatgatttgggagaaatagagcttccacctttttgcttgtgtttcttcttttacaagtgttttgcctaaaacctctttcaaaggaaattaaggcagttattgacccaaaaacacagtacacatgattctttgtttttgcttccaggagatgaccggaatattgaggaggtttatgtgggcggaaagcaagtggttccattctccagctcagtgtaagacccttgggcatccatgatgttctcctgggatgacatggttctgcatcttccttgtgcccaggtgctggttagaaagtatgttttaaaaagtgccgtgttcttcggatgacttctgtttctacgtctgcttccagtgctcacttggtaaattgtgcaaaggaagtgcactgttcctccactttggttgggagcaatcataatttcatgacagtgcctccttcggggctgcttagatttgtgttaagctcatacagaaggcagtgttaacagctggcactgtgcttctaatatagaaggaaaaactttctgtgtagggaaatacggtgcaaagaaatatccctatgtggttagacattctgagctaagtgaaaagttggaaactccgtgtgaaccattgagtagatttttatgagagggcacaagctagactgggaacagatgttggaaaaatcattgattgtgcttggaaattaaatactgagaacactcatgtaaaaagagaacttactggcttttaaaatgcgcttctaggttgaccttatctatggaaatttgcactttatggaatttgcatttcagagatgtgttattgttatgctttgccttctttagggatgaatgtcagaacccgaatgccacatgcttttcaaatatagttctgtgcttcaaagtgtttgacagaagttgagtattaaagatttacagtctcttagggatagtattcatatagccacatggcataaatagttgtgtttttgtgtacttcagagtcaccttgatttctggctgtgtggtgttacaattgcttctattttattagatgagaaacaagccccaggtactgctgctgtgtagtctggggtcttcataaattggggaagtactgtacccctgggagccattaacagtaacaggacagggttctttgctcaatgccctatctattcaacacattatgtcatcgtgtttgtgaagttctccccctatcaatgtgctagaaataaaaagccaagtacaaatcctttaaggaactgtgaataaggctctgtaaggcctgtagatcgaaagtactctaatttaccagattgtcacttgaattccttaagatttttctggcagtttctattagtaggatttactgtgctagacatgaaggaatattaaacaaaagaaggcattttatcttttctaactaacattatgtaccttcttataacaattaaaaccagattataaccacatggcagattcttaggaagcaatgataagttctactgaaatactacatttttcttaatttattccacataaacaatcaaaaatagggaacaggttttgttaacatatcatttcatttccagaatttcggtgagtttctatatgatcttataacagaaaaaccttaggcaatagagctaattccgtgttttcaagtctgaaagcacacagttcttctgctgccctgtaaatctcagtgtcgcgtagcatgctaacttggcagtcatttgtccagatctattttcctggttagaagcacttttagatttggttgtgtagacattacatctaaagatggtacaaatatttagtcttacttatttttatttttattttttttaaagacagtttcttttgtgacatagaagtgaataagcccaacttctggtcttagtctgaatgtccagtgtttcaaacacaccagcaacatcaaaatgatctgccaaaccccctctcccatttctctctgaggctggcaagtgttttttgctgtatcttttgactcttgccaaagtaactgaattacagggcatctaagctgagtgaagcaggccaagtagcttaggtgtgtgttgggtaagagctctgccagccagcagccgcttccagcctttgcagaccccacactcctcttcctcaagagtgtgcattttgatattgaacatcagcttttatttaaacttgagattcacacacagtaacataaattagtgtattctggaagtaggaataacagttatttgccaccatcctagcaagcatccagattagtcctgatagtgtgttacaagctgaataacttctcattgaaacaatgtattgaagtgtttacatgtactttgatctccctgcatcccttataacttaggtgttttattttcccaagtgaagtgttcctgagtgttacttatgctgtttcagtaccccatacatggggtcagatgtcctgcactttgaaatgttgcctttccctaatgtaggctgactttctgaattacaggtaggcactatttctagcccatccctgttgtcactttttattttatttgaatggtttgctctctttaaaagaaagggataaacaaagagatgaaggaaggagggaaggaaggttaaaacattatccttccatcctactccataccattttcctcgtttctctagaatttttgatgaagttctttgtaaaaagttaaaaagcattaaaattatcatgtgtattatatttccaaaatttcttgtaaccaaaataaaaagtaggctaatcaagaataatttgatggggggcatttaaaataagagattagaacctgaaaagttgttctaatcttccattgggccaaagagactaaactcctctgttgtgttatctttgctggttctttacttgcactgtcaaagactttagaatccaagagcacatctatattcatgccagaagtagggctttctaagttaattctgtgagcattgagtctcttcttcagtgagacatttcaaagttaaaggaaaggacatggtaggaaaccccttcttcattgcttagcggattttgaagtgtgcccttggatgtccctgttggcaaatgctctgaaattttacagaggaaacataatggctgtgagatctagcaatgtgttatggatcttcactccctagcagattatccctatttttaagcctttccacttcagaagcagacataggggaagccttcaaggcatcctggagagcacattgcatcaggcccaccttgtgtatatacatgtgggagataccagaactggttgcttctggagcttggtgggcatctttgaaagttgctgctgctactgctgctgggatattcaaatattttaagagagttaccttagctattaacaaacagaatgagaagtgtatcaaaggcattagcttgaaatcattttttaatcacagagactctgtataattttttttaagaccaaaaggagatgtttgcaatttctattctactcgctgctgcaggtatgacatcacacattacactttataatgtctccagagacagtatgaaaaagtttctaaagacctgggaagaagcaggccagtgaaaaagcacagagaaaaagcaaaacaactcttgacattcatttgccatgcatgtctccaagcctactccaactttcttgcccatctgaagcattgggtgtgagagagtgagtgtttgaagggttagtttgtggatctagtccaactttagtgacatgcaaaagccagccaagtccacgatgaaatgaaatgtaagccctgagcaggctcttaccaggttacttgagtaattgataccgttgttaacctgttacttggcagtgactcatctgtctatttcttacccagtaatcctatcagaaagcattccttactttattgttaacctcttgatggctgttcttaagaatatatacatatatgtgaatgtagtcaaggggacatccttcccctcagtatttgtatgatttgcttattgttactgtactgagtgagctcccttgtgcatcaggaaacaaaataaatgagattttgtgtttgcattagtgtctgttgtgtgtgctgttttgttgcaagttctattggtatgatgaaaggaggatgaatctgaaaatacattttgcttttcttataatggattaaaaatagactagaatatttagccatgggtcaacatacaccttccatcatatcaccatacatggatttttaaattaagctacttcaatggtccatctagattggcagcttatttgagttgattaggggatcagtaaaaacatattccagttgagtctgtaaggaagcacaggacatgaatagatcatgaaggctgtgacctaatgaatagtttaatccactaatgaatttaagattcaactatagtgttgggagggggtgaaactataacaggtgaggcctagtgggaggatgtagatcactacagacatgttatttctgttactgtccactcaacatcctgtctgctatgatgtaagtcattccaccctgtcctccttgtcatgatgaattgaaacatctggtattgtgagcaaaataaaccgtcctctattaaactctttatatcagctagcacttctagcattttcaaccctttagaatcagatcactatgctttcagctttagcatagctgatttttcttattatttaaaacatatttgtttataatttacatgaatgtgcaagtgcctgctatgtgtactatatgtgtgccagtgcctgtgaaggccagaagaaaatgtcatatctcctggaactggagttataggtggttgtgaggctcctgatgtgggtgataggaattgaacccatgtcctctgcaagagcagcaagtgttttttaactggtaagccatctttccagctctgtttgtcatgtttttaaagctagaacccagaataagaaatatacctcacatcaataatcagttcattgggatgtaggaaaggcagatctatggggaagctacgagtacctacacattaaaaactggggacctcttcacattacatctttgagatgatacatctcaaagccttagaaaatcaagaataaaataaatctaaaaccatataaggaaaaatagtaaaagtcagagttgacgcttatgagctggcaactaaaaaaaataagagttgattcttgaaaagggagaaaaatagaggaaagaaaaagaacaaacccttaactaagccaactaaaagaaaaagacctaaattaataaattacgttgaaattggaatattacagcaggttgcatggaaaacaagaggatcattagagattatcatgaaattttacactctcacaaactggaaaaatctagaagaaatagaaaaatttctaaacatataagcttaccacttgagccaagaatatatactcaatctaaataaacagctgccaaaaccaagattgaacaggatgtctcccatcagaggaaagcctaggaccagacacattcacaagtgcatttaaccaggcatttacagaactgtcaattgtgagcttcaaactattctataaaatagaaatggaagagacaaatgctcactttatgaaggaagacactgatacaaagtccaggtaacaacaacaaaaaaaaaaaaaaaaaaaacaaattatttgatgtataaagatgcaaaaatggctgggtgttggtggcacatgcctttttaatcccagcacttgggaggcagaggcaggtggatctctctgagtttgagaccagcctggtctacaagagctagttccaggacaggccccaaagctacagagaaaccctgtctcgaaaaaccaaaaaaaaaaaaaaaaaaaaaaaaaaaaaaaaaaaccaaaccaaaccaaacaaacaaaaaaaaaaaacactgcagatttatttcaataacacattacaaccatgactaaattggtcccattctagagaagcaagaatggtccaccatccattaatcaataaacatgttagagcctatagatagaatcaagaacaaatattgtattatcatctcaatagatacagaaaaagcttttgatgagttttaacactgcttcatgttaatgaatctaaaaaaatcaggaatagaaaatcataacaaaggtaacattcattaaacctataaccaacatttcacggaagggtgaactggaatgcagttctacatctacaatcaagcacaagatgggatttctaattttgcccctgtcatttaatgtgtagctggaaatcttagctaaagtaacaaggcaagaaaaagaaataagagatataaatggggaaaagagaagttcatttgtccctatttgtaaatgatatgttcttatacctaaaataccttaaagaatctaccagaagactcttagatttgataaatgcttccagcaaagtagcaggatacaaaagtaacatacaaaatcattagttaaaaaaaaataaaccgccgggcgttggtggcacacgcctttaatcccagcactagggaggcagaggcagacagatctctgtgagttcgaggccagcctagtctccagagtgagtgccaggataggctccaaagctacacaattaaccctgtcttggaaaaccaaaataaataaataaataaataaataaaaataaaataaataaataaaaataaaaaaataatgaagtcaccaaccaagaaatcaagaaaataatcccattcacaatagccaacaaccaaccaacctactaggaataaacctaatcaaggagattaagaacctctatgacaaaaacttgaaaactccaaacaaagtaagtccccaaagacgcaaggatttcctatgttcacagattagcaacatttttaaaattttaaaaatgaggggctggagagatgactcagcagtcaacagcacttgaggttcttgccaaagacttggattgggattccagcactcacatggtggctcacaaccatccataactccagttccaggggatctggtgcttgcttttgacttttgcagccccctgcccaacacacacacacacacacacacacacacacacacacacacacacacacacagagtcatgcacgtagataaaaataaaatttttagaagagtctaaaaatgactaactcaccaaatgaagcccagattcaatacacttcccatcaaagtttcagtaacatgctttacagagcttacattcataaagtaacataatatgccccaattttgagcataaaaagcaatgtgacaggtgtcataatacctgctttaaaatgatgcttcagaaccacacttagaagaacagcaaagtatcggcacaaaagatactgtcttggtcagtgttctgttgctatttagagacaccatgatcagggaaatgcttataagagataatttaattggggcttgcttacagtttcagaggtttggttcattatcatcatggtgggaaacgtggtaggacacaggcaaacatagtgctggtgaagtagctaaagagttctacatcagaatctgcaggcctcaggaagagagccattgggcctggcttgaactttggaaacctcaaagaccacccccagtgacacacttcctccaacaaggccacatctattccttctcaaagagtgcaactccctgatgattaagcattcaaatatgtgaatctataggggctattcttattcaaaccaccacagacatgcagaccaacgagatagaagagactcagaaataaacccattcagctatacctattttgacaaaagtggcaaaaatatgcattagaaacagtttaggaggtagaaccaaaaaaagttgaatacacaaccattaaaaccttcattttgtttatttttgactattaatcaagtaatgctaaggtaagggtcttctgtacataaaacttcccacatatgatttctcaatagtattacatgttcgtgtttctatattacagcatgaagtctaaagccattcatagatttgatctatagatttgcccctatccccagtgcctgagcaactctcaggacaagtctccatggcttctcccccttcctcagaacagctgtagggtgtgctggaatgtcagcatctgagtattgagaaactgcccggatttctgagatgtgatggctcaggtatcccgtcccttgggtggaagcctgaggaccttcagatgaggtacatgtcaaacaaatgcatttaagactctgcacaccatgggcagttctcttgaccagtgggggtcccgctgtctgcaaaacctctggctgtattgtctcctaccacctactctaataaagtcctttcgtttgacttactgtatggtagttttgtcttgcctgactcatgcatttaccaggaactgcagcccacaatggagtggggtaccgtgctggctagttttttgtcaacttgacacaatgtagagtcatttgggaagaggggggctcaatggagaaaatgtccctaccagagtggtccatgggtgagcctgtgcagcatttctttgatggatgtgggaggacccagctcattgtgggtggtgccatccctgggcaggtggttcctggttgtataagaaagcagtctgagcaagtcaagaggagcaatgccagtaagcagcattcctttatgtcctctgcttcagtccctgcctcaagttcctgccctgactgcagcaagagatatgctacatgctgtaagatgaaataaacctgtttatccccccagactgcttttgtcatggtgttttgtcacagcgatagaccttacacaacttttgggggagcgtggagggttgagacagtttcatgtagcccaggctgacctatgtagctgacactcactatgtacctgagaatagcctgatcctctttgtccacttccaagtactgagattacaggagtacatagccacacccaactctggctacttcttttcttttaaagaacaatctaggcaaaatatacagtagagaaatttcgtgcacatgaattagcaataataacaatgcccaatttgagggcactgtgttctgtagtagcaattaacagacatacaaaaattattttatggtactgaattaaagatttgaataaagtaagatttacacataaaagaaatacagaactgtgataaggctcttcagggatccatgaagaaattactcagtggaacagaacaaacagtaagtttttgttaccaacaaaagcagggttttgtttaatcttttaaagaatgggaatagtgtaaatggggacaggggtgggaggccagggtaaggagaaaatgtagggacaagtgacaccaaagtccccttgaaaagccgtatagaaacttactaccaaagatgcttcttaatatgtgtgtatgtatgtactaaatatatatttaatccaaaaatgtgcacacatgtgtgcacacgtgtacaaacacacatacacacacacacactatatatatatatatatatatatatatatatatatatatatatagagagagagagagagagagagagagactgactcaccatatactgggagaatgctacaactagacatgttataccaccaagtaaaacacacagtgtaaggaatgggttacatcttgttagtcattggccaaagggtcccatagatgccccaagacatcacaggctattgccaaggcaattggttactctttataacctaaaggtaaggtactattactgaagacacaatttacttatgtcatcaaacatggagaaatcaagtaggtgcccaactagaagcttcatgcccatggtactctgtatggtactggaagagaaaagtagtcattaatatagtcatcaggtagctacaaaccctggggtctacaacagaaagctgcctgcaaggtatgctggtgtaattgtggcacaaattatgaaagtaaccaaccactctttgattggatttaaggcccactccatgagacagggtccagactagacactgctaaagtgaccaagaacctgagactagataggccattggccatgggggagaaacatgcccccattattcagctatgggaacatagcaataaaatgataattacccattttattcttgtagtaggtggtaattaaaacagaaacccacaaatggccaatgtatggaaagtgaaaaacttttcctcactcagccccaaatgggatgccgttatcaaattcctctcctcactgctcagggatttatgcagaagaggaggtagaaagaatttgagagctagtggtggtggaggaaccatttaaataacatcacccagacataataggactgatacacatatggacttacagagacggtgacagcacacacaagacctgcacatgttcaaaccaaacaacgtcttagcatagcgaagcggaagtacaagtggggtcctaccccagccaggaagctatttgcaattgatacctgctgataaagtgaaaaaatcagttttctacaatggagggtcaccagttatatcacatgcactccagggcagaaaccaagcccagggatagttggccaacaacaaatgaagtccacgtttttgttgtttatttgtttgttttgttttggtatttttaatcacctttttttctctgagctagagaacatgaagttgggttggtagagagatgggggaagatcggggaggtttcggcaagggaaagaacatgatcaaaatctattgtatgaaaatttgtaattcaaaatagataaaggggaaagattctctcttctttaaatgaataaaattacgttttaaaaataatgaattttcccactgtggcaggcatcagctttatctccaaccgtgtatctaatgtacaccattttgagggtggcaaggatcatatgtgagttactcaagaaaagtgcagggctttgtgagttcagaaattgtgttttgtgtgcagcaaaggtcattatgccatcactgggcagaaagttcattagcaaactttgcagaaatttccaccagcaggtgacaagaacagcgctggccataaaggaaatgctcctacccataaatacccagggctgcctcctgaccctgggacctgagactgtagagttgatgagcagatgactgctaatccccaacatgctctcagggccacagaaactgctgtcactttgacattaatgggacactttaatacctgatgttggcgcgagcctcttctgtatccgttctgatgatacagaacttaaacttaaacttaaaagccaagtctgaacacctttagtttccttgtgcctcccactactgacttctctggagacctggcacaatattttaaaggaccattttcttttcaaataaatgaatgaaggctatacaacaaaatgaccatctcttaggaactttgctgtttcccatgtcatccctgtccgccaggggctctgacctccccacctgtacaataactgccacccaacccagctcttcagggtcccaacagcagctttcattaatggggtctccaacttccttccatatggtaaatgtcctaacatctagtcagtcatgggggagggaatcgatacaaagatcatatttctatcatttatagaaataactgagggcaaatttagccagtgaaatgggcagttccctctgtagaagcaatcgcccttttgaagatgactccatgtactgacaaccagttgtaagaaaacgtggggagccttgaactaaatgtactgggagacatggtgaaagactgtgctactcagtcacaactggggaactcttccccagccaggaagacatgaaggtaagggtcccaaagacaacccatgaaatatttgttttttttataacaaattataagtttttataattaagttataagttttttttataacttatttgttttgttttgttttttgagacagggtttctctgtgtagctttggagcctatcctggcacttgctctggagaccaggctggcctcgaactcacagagatccacctgcctctgcctcccgagtgctgggattaaaggcatgcgccaccaatgcccggaccccatgaaatatttagacaccgttagtgtagtattaaaatccagggctgtgtgtgcctctagaggcccttcagtgctttgttctacccagactaactaaatatcagcgagtggaggagcctcaagtggaaggagatcccggggcctctacaggatgaagtgccattttgttctgaaggacacttgaactcaggatacgaggacactgaggctcatcccagggcatgtctactaggatcctccgcagtcatgtgcctcacgatcatgccttgacatgcacatgctcacagaagagcaattccatgccatggctttgtcctttctacagtgccaatctgaggcaaaagtggaacatcactcatgtctggctggtcacctgctgtggctagcagtgtttccaggttccaagtgcactacacaaatcaaagcactttctactttgtacaatgattaaaagaaaagttagaagacactgccatagaacttgatttcccagctgcagctgacttggcttggaggccagactcatttagggttggaatgctgtacagacacaggcttcattatggttgactgtagtccatggggtgctgacaactgggagcagactatgcgtggctttgaagctaagaaggtccttctaattaccacaaaagtgtctttccagccagctggcccagcagccactgagcaaagcttgtgtggtggtatatgtctgcttcaaacattcttagttcccttgagtgtctctgcaagattctggtgtagggtattctaattgttattatagcaaaacgccatcacatttaaagaggaaaatactaatcaaaatgttttctgatgcttggcatgaagcacatgcctgtagttccagcattttggaggcaggggtaggaaaatgacaggatcccaaccagtcttaatacaaccctgtcttgacaaaacaaaataaaatattttataacaaggtgtaacacagtagcaaaagggttgcctactgtgcacaggttctaggttcaattccagagacacaccggtgagtgcacatacacagagattcacacataaacacacaaaatcacatacacagacacatgcatacagatgcactaagaaagacatacacacatttacacacacagattttactgctgagtgtaaggcacagtggaattggtttggcaaattacacaccaagttatgaagctcctcctttattctgtccagctattggctggtcaatgtctttattaaactaaccacagtgacatatattcattcacacagtgtaaaggaatattccacaaataagagtcatagaaattaaattatccagctgggcgttggtgacgcatgcctttaatcccagcactcgggaggcagaggcaggcagatctctgtgagttcgacgccagcccagtctccagagagagtgcctgaataggctccaaagctacacagagtctgtcttggaaaaaaaaaatccttcttcaagcccataaaatgataatctcacatgtgaccttgcaatgtacctcagtaatcaaacatttgtctagtatatatgaagctgtggttttaatccctaataaaacattctctctctctctctctctctctctctctctctctctctctctctctcacacacacacacacacacacacaaacagcatattacattttcatgaaacaggtgctcttgtttgttactcctgagacagcagtggtaataatctgagaggaagaatttaatagcagttttcaaaaactaaaggtccttgtgtcctcttaccttataattcggctctggggagtttattctctacacaaacacaaaactatttttgtaattgtggtagcaaaagattatgaacagcctgaaagtccatacacagagaattaggccccaatggagctgcttgcaactttctgaagcagttgcctctgagggaactggggactcgatttgcatctcacagccttctcttttgcatttgtggtatctaaattttgtggtgatcttatgcattgcacattgaaatgcatgcatatcatacagtgaaaaataaaaccagaactgaagcaataacaacagctagcacggtacatgctgattctacacgcaaagcatcattccagaggtttatgatattggctcaagtaatcttcacaaaattctaaggaaaaggcatatcagcttttcagacaacaggagttaagcaactgagttggatactagatcacgtaaggggcattagccacgcaattagcaagattcggtcgaggtttgcaggttagccagagaactgcaaactgtcttttaaagagacagagaatgcatgttttgagttctgtagatgaagtgaaagaatccctgagggtccttggcagctactcggctctgcgacgtcagcacaaaagcagatggagataatgagcatgtgcagtctgaagcaaattcattcacaaactttgaaatttgaatttcatgtgttaaatggttcttaactgtctagactcattcttagctagagggctctgcagaaagagatgatgatcttaatgtcactgtctggtcgcagtttaaccttcgggtaagaaaacagtattaacggtctgctccggactttcaaagtgattccccttattttcagaaaatagacatggagatagagttaaaatatttgtctgttaccaattttccggtgccaaatagttgctcagcttttacttgtatacatccactgatgggaaattcatttaaatccttcactatagggcaacataaattaattaaaaaaaagcctttaccgaattgaagggaagtattccaagttagggagaaatattatttgaaagtgaacaaaaccagtgtttgctacatggttgtaaaactggcttttttttttttttttccagtagcaatccttggaggtggtgaagctaatgtttaaccagtctgccacctagtggccaaggcacgaataggtgcatttgaaataaaatctctcctaactcccaagggcctgggcggcggcgggggaggagggtggggctttcctcgtgccttttttaatctttataaaaactttgctactaggtgattattgtttaaaatggtgatggttgcgagttagacaatattaattccgtttaatagaaagcagatggctaaacctgtcattcaaagaccgcatcccacctagccggactcccagggcgcgagcctgctctgtagtccactaacatacaaaatctgggctgcacctggggctcatttcagtcagtagagttccgcagaagtgatgtgctgattctgggcctaaacctttgggggaagcctggaaacgtctgctactggaaggtgtaagccatcatttaagaagtctaggtagaaaggcctattgtcgaagaggctgggtagacagaacataggagaaggtacacagagatgagtaagtcatagcatcacatgcagagtgagcaaaagtagtgagggaagggattcaggatagagaaggagaagaaggcagaacgagagagggagggagaggggagcccttaactccatagtcctgacttccagatatctctgcaagagtcatatttgcaaacaatctccagagtacgccagttgaacctctatctactcagtcctccaagtgtcattgcattagatccagctgaactccatcggcctacagactcacgggaaaactactggtcaaaggcactcgttttgagacagttctctccggtctaatagataactgaaatgagaagatccgtaagtagagtgtggtgggagttatcaacttcctgcctctcaccttcaatgcgcccttgcttggtgtgatctgtgaagatgaagtggagtcctcaacagcctttctttgacatccagtgtaatgctcagctttatcagtagaggaccccaagaaggaaagctcccgggtgctttcagtaggctcccgaagagcgacttcctatggcaaaaatttctccacagttgtgcactatatgctttcgtggcctctccaggaaagcggtggtcatgtggctaatggtctcggacagtgcgaagccacccgtgtctggatttttgtctcccgaacctttcactagagcaacagttctaagggcctcgcaatccggtgagcctgcctcccagtccttgttctaccggcagccccgggctgccctggcccaggctgtgctcaggggaggcatctctaactcccggtagcaaagcatcttcaggagtgccataccccactttgggtgggcagccagcttcatcctactcatgacttgatgccatgaactctatctaggccttgtgatcacttccctatgtgtcttctactatttttaatggagccatatactggaaaattaaatctgtttgcctgctgactagggaccagatctgaaccaggcaaccaagtgaacttctctgtccagtgaataccccttccttcacagatctttctacctttctcaagactgtctggggggttataagttttacttttctaaaaatttgaattagaaacaagattgttttacatgtcaatcccagttcccactccctcccttcctcccctaccaccctacgccccaactaaaaccctacctatcacatatcctttctgctccccagggagggtgaggccttccatagggtatcatcagagactaccatatcctttgggatagagcctaggcccacccctgtgtgtcttggctcagggagtatccctgtatgtggattgggctcccaaagtccacacctatgctagggataagtactgaactactacaggaggtcctgtagatttctgaggtttcctcactgaaacccaccttcctggggtctggatcagtcccatgctggtatcagccatcagtctggggaccaggagctccccgttgttcaggtcagttgtttctgtgggtttcaccagcctggtctagacccctttgcccatcactcattcttctctgcaactggattccagttcagttcagtgattatttgtgggtgtctgcttctgcttccaccagctgctggatgaaggctataggacggcatataagatagtcatcaatctcattatcaggggagggcatttaaggtagcctctcctctgttgtttagactgttagttggtgtcatctttgtagatctccagacctttccctagtgcttgatttctctgtaaacctaaaatatctccctctattatggtatcttctttcttgttttcttctattcttcctccgactcaacctttctgctccctcatgtcctcctcacccttcctcttctccccttttcattctcctagctccccgcccccttgctcccaatttgcttacttttccttgcagtgtgaatgactagttgtctgcactgagtggctatgatgtcagctcaaactgatccaaacttagaggacttctctgcagtttgacactgacacacagtttttgttgttgttgtttttaacatttatttatttatcatgtatacagtgcatgccagaagagggcaccagatcccagtacagatggttgtgagccactatgaggttgctgggagttgaactcaggacctctggaagaatagtcagtgctcttaatctccgagccatctctccagcctgacacatagtttttaaaaaagatttattttaaattacagctgcatcgtgagcttgcacacatgagttcaggtacccatggaggcctgaagagggcatcagagcccttggtactggagttatagtcacttgtcagctgcctgatgtgggtacaaaactgcttttaaccactgagccatctcttacagcctacatttttactttttatgatcacatacaaacttttccttatcaataatatataaataattaatatcctcttattattaataaagcatatgtacacataatcattcatatacacttactcagctgtagacaggatgcaaaatcgtgtctcataatgccactgagatcatgctcttggggaatgcaataacagggcaaagggaaacatcttttgcccaatctaagcagactgcatttgaaagtttactgttcacatttctaggtaaagtgtgacttattatcatcttttgagtcaaatcgtttatccagtgcaacaaatgtcctcccacctaaggagtgcctggcacagccaagtactaaataacgctagcaatgaggcagaactggaaaggattttataggcgaaatgtaaataagagcgcatctgaatgttgtattcagttgggctggaacccagtgctaatctcagaaactaaacaaagcatgtgaaattgatttgtctctgcaaattttagtgcatatagacagatctgcccatatctgaagactcgtcaccagtgtcactcaatccaattatactcaattcaagggcatcttgctgtgacaataattgaaaaacaatgccaattgctttgttttccttacattactgtaccactgggtcaataaaaatgttttcacattgctaattcatgttttttttttctaaccgccaagagaaaagcttaacaaatacactattatcctaatgggaattgtcattaccattcaagtattaatagtccttggaaagaatttgtctctagggaataaaaactagttctccctgtgttttaagattttgaaaaacatatctgagtttgctgaaaacatgtagaaatgtgcaattttggacaaagagtgtgcgtggggatagtaacctaatcaggggtattctttgcaaataattcaggctaatttaaggatagctgctttaaaaaataagatgttgaacaacctggcaaccagataatagcatggcccagggtggtctgactgtgggcatcaaaacaaggctgagaacggccagtgctgggcctgctggccacagctctgataaacacaaccagtactgagtacctggacctggatgctacacttccatggagcttgtcctcacttctcatctgattgcccagtgtggatcataggccatcttatagttcagatgtgatttgttttatgaatgggaatctaactcccatccattgtgaggcattagaaaggtgggaacttaatctcactgtaatgtttcacagtgagacatttaggaggggattagaaacggaaatggattatggtgcctctaggacagaaaatactggtggctttgtaagaaggccagaagccagaacacacacacatgctaccatgaaacatgagtgtataacatgctttgccgtgtgatgctaagggccaccttaggactttgggtcttaatcccacatatctaaaagctaaataaactacttttccttagaaagctgtccagccttggatgttttattatgatgatgctaaatgaagtagcacagggtttcatttctgtaattggaagtgaataacaaggattttatcctgagttttcttagtgagagctgggtaacacatcccactgacaccatgcatattggagaattcctagaaaagagacagatggactgggtatggggcctgggttaaaataaaaacttcataatatccatctctgccataggcaggttctaccttttgcctcctgagtcccaaacaacaattttgtcctaaaaataattccttgcctgggtttattttcctgttcctgcttgtgccagtatttcatctaaatagtcatgatccatcactgattctgcttcctaacctattcctgccatccccttccccttccagctaaacttctctcctcaggttaagtgaagggactcatcacactggtgtttgatgaggcagagcaacgatgggaagaggtgaggagaaaagtcttgttgtcgttatcaagggaacaaaagaagtactctatgcactggcacccgtggccagatgtctgaacgtgtgcataacatagacaggccaaagatgggccatgaatatgccattgacttcttcatggcaggcagagattgccggggagaagcctgttagtaccagacacaatgctttccacttgctgccttaatatttattccccagaagaagcacatgtgtggccactcagaacttgtctgcatcacatgccctacagaacagcacctgacacctgctgctcatacagaaaatacttcaaaaacccaacagagtggctgagagcgtagctctgtgtcagcgtgcttgcctgacaggtgtgaggcacagtcccctccccacaacacacacagtcccacacagcacagccctttggtactttctgaggtgggcattcctcttttccagtgttattgcctagacatatggccacccctccaattctcatcccttctgagggtccccctgatctcttcccctttcatgtgatggtcctgtgctcctcactgtccttggaagactccctgctgtgaaacatctctttccttgtctcagcaagttctctgtgaaatattatcatcccgtcttttcctcagccagcttggaaattttcactcactaccatatctaatcttgtcttctctgtgactcaggagttatctgagacccagagtaaatttttagctgtatcaaagattattaggctcctgagaactagcttagaaacagaaatatctagtgtgatgtgacaaactgtcttactttctgaagcctgggggtgtttggggacatggaatattagtgcttctctgggaatgatacattttacatgtttaacacctgattgtctctggtgaaacttgggagaaagctgtatgtcttccttcatcacagcatgcatcagagtagagtcgacatgacagtttaatgtgctctgctaagagctcccaccaaaacctccatgttgtgtcgggtcccattgttattgactctgttccactttgccttaaggtcagacacttcaaacctattcttgctcctcaatgctaaaaaacagcatgtttggcctaaggtgtggttactagaggtcttgaccctcaagaccaaatgatagtatgtttgacttagggcatggtcaccaggtgtcttgggtattggggaggtaattacatttgtttgttccttgtgcagtggtaaggaagtcttttgccctcccttttatttgggggtatataagggcgatgagtaataaacttgggatgtctgcagtattcactgagtgccatctggactctatcttctgtctcttgtctcttttcttttctcaatcctcactcccccttccagacacatttgcactcatcatctggacctgacaatgttatctagaccttccaaaggtcaaacccatggtaccgaggacagcaagagatttattcatgatttagctaaagaccaaaggaagaggtggctgtggctgtggcccctggaaggaactaagaaatctctacagtaaatctacagaacctgttttctgtagttgttaaaacaaaaacaaacaaacaaacaaacaaataagccaggtggtggtgatacacctttaatcccagcactggggaagcagaggcaggtggatgtcagtgtgtttgaggccagttcagcctggtctgtatagagaaactcttgtctcaaaaaaccaaaaccaaacaaacaaaaaaccatacttggttcttccttatagacagacgagactagctatgtagccaagagccagtttgatagggaagtcgcccttgaagccctgaccaatgtcatctacctaaacaggcttgtaatatcagctgtgtaaataggaaaaactcatatttgaaaactgctgcccaaaacccatgaggtcaagcacaagtacttggtccccagtactagttggggaggttatggaagctttaggaggtactgcttgctggaggaagtatgtcactgaggttaagctttgagagcttatacccccaatccactttctgctggctttctccatttcctgtgtgtggttgagatatgatctctcagctttttgctctggctacctgctatcatgtctccttctcccttatggattctcctctgaaactgtgagcaaaacaaactctttatcctataagtttggtcataacatttgatcatatcaaaaaaacagtaactgatataattggccatggccatggccatgtttatttagataaccagttaaagccttaggtaagccaataaaagcagtggtccgctgccttggctgttcattagacttaactgaaagttttaaaagtgaatctccatattcccagttgtatagcagaccaattatataagatctatgggcatggaactttggaccagtggttgttaaaactttctaggttggttccagtgcacagcaaagtttaaatgcaatgtgttttcaaactcttaaaccttggctctcttagcccccttaaaaattattgagggcacagagttgcaatttatgtagatgatatatacaatttcaagagttttaacgtatgttggagacaaacctttagtggatatgtaatttgcaaatatctctcactcactgaactaccttcctatttctggtagtattctctgaagcacaaaagcttctgtatctatgcgtgtgtgtacatgttcatgtgtgaggaggtcagatgttgggatcaggtaccttcctcaattgcagtccaccttatgttttgagacagaatctcttgttgaacctcaaggtcactgatcaggctggactggctgaccagcaagcctcaggggtcctcatgtctttgcctcccaagagctgcgattacacgcactcaatttttctcatgggcgctggcaatcaaacaaatctcctcatgcttgtgaaataagtgttttattgaaccatctcttcaaacccaaaatctttttttaatatagattttttattttattttttatatgtttgaattacaaacaagattgaattacatgaggatcccagttcccgtctccctcccttcctcctctaccacccccccaacccaaaatcttaatcttgttgaaatacaatcttttttattcttttatcatttctacttttgctgttatatttaagaaattgtttcttacctaatccaaggtcactagtatttgtttctgtgttttctttttggagacgattcattcttttagcactttcattttagtgtacaatccttgattgcataaatctatgtatagggtataaggtagaagttcaaattcattcttttgcacatgtctgctagttgcttaagagactttcctttatctattgaatcttaaaatatctcattgagaatcaattggctttaaatgtcagagcctattctattccattgatcttctgtctgcctttatgttaggaccacacaatcttggtttctgaattataataaatttagaaaccctggtacctgagttctctaaatttattctttttccagattgttttgtgaatttttgaatccttgaatttctgcataaattttaggcttcttgataaaaagtcatatggaaatgtgaaggagatttcatatagtccataatcaactagaaatcattaccatttttgcctttgggtatataaacatggtatacattcacacttatttatctcttcttcaatctctttcaacaatttctgtactcctctgctgaatttatttctgtgtattgtattccacttggtgctatgataaatagaatgactctttaaatttcactttcatattttccttactaatgtatagagatgcaactgtattttgcatattgattttgtattctggaacattctgaacttggtgcttagttttttgaagtttgggacgtatctgaagtgtgaagtttgagataatatatttcttaaaaatgtttatatgtagaatcatgtcatctgtgaaagaagtaatcttacttctacctttccagtctagatgtgtctttgtttctaattcttgcacaagtccctgcccagaagaatgttaaagtataaagttaaacagaagtggtgagtgtccttatcttataatttgaggaggaaccatctagtctctcaccaccgagtatatgtggtttgtaaattgatgaggctttaaaagatgccctctagttctagttggttatttttatcatgaaatgatactgaattttcttgatgctttttcttttttaaagatgtgttgttttgtctttcttgtttattttgagagatggttcatgtaactagactggcctcaaacttactgtgcagttgaggctaagcttgcactcttgatcctccacttcccaagtgttgagattacaggtgtgtgtcaaccgccatcccatcagctgtctttctgtatccattgaaatgatcatgtactcactcccccaattgtatcaacttactgtgttttgtgattaatttttaggtgttaaaccaaccagcattcatggaaagaatcccatttagtcaccgtgtataataattttttttcttctgaggattgttcatagaacattggtatatatttattgaataagtacacacacacacacatataaatgagggagtttttagaaacaaggagctatgctcttatctctatcctatgaaaagctaaaagttaaattgaaatggaaacactgattagaatgaaaagaaagggttcttacttttctctttcctacacaaggggacttgtacagttgtataatttgacaggttctgtttcttcatctctgtaatggagcccagcccaggggcatggccaatgttcttggagtcatgttccagccatgataaactaaagtctctaaaacgtgaagttcagattttaggagaatattttctgtgctgtttcacacctcagttaatgtctctgaaattatttgggggcaaaagataagtgaattagttcaacacagcatgatcacacaaagtgtactttgtggagcacagaaaagtgtgcaatcctttttaagaaggtatggctaaatttaaagacagacttgagcagagttccaagagataaataggagtttctcagctacagatagcaggatagggagataacttgtgtaacatacatacatatataacatatatgttttctttttataagctttcatttcaaaattttaaaaggcaaactttttacttgcttttgcagtgcccacataaatagcttgtgagagtaaggatgcaattgaagtttaatagtttaaataggtaaaaagacatgtagttcctggaactgaaagtaataaagccttgcaagtgggtttccagtggtccttaattataactatatacattccttttgaattttgtcaccactattgtcatgatgcccctattccagcagaggacacaattttaagtatttttcttcataagatttaacatcatctttcgtagactctagtttttagtgtatttaccacaaggtgcttgggatgtttgaaatagaagggcagaaaataaagtttatccacaaatcataaagtattcaaggaacatttcccacagaatgagaatggttagctatgggcagttagctgtcaagagccatcatccgggtttttcttcaagcatgagcaatattagggtgaagatgaggccattcctcagaaaacctaagcaaaaaacaatgtcttttaaaaaaatattacactcaacttaacatttttttggcttaatttgaatcattggggttttgttgtttgttcttgcttttgtctttactctaaagatctttttgtagataaacaagtaaacaatgacttgataacagctgcagacattcatcttggtggagttcagagatcagataaagactcagggacccacctttgatttttatctttcccttattactggtcttcaatcactttcttttgctaggccttagtttgtcaagcacaaaatagaatcacttatctacctcacaggacctgttgtctaatcaaagaagatagttgttagtatttaggtatctgtcctggcctgcccttggggtcctgacaggatatgtcctcagctacagtcactaagaggacctcctgcctacattcaccacactctcttttaaaaggttagccttgcccacctcgcatctcctctctctctgtctctctctcttccatcactcttgtccctagggaccagtctctgcccctctctctgcctttcctctgcctctctctctacttcaaataaacctcctatgtgatccttgttacatgccatgacttgtcttcatggtgtttttttttttttttaagttacaacaatagtgcatctaaaatcagcttttaaaagaagtaggttgggttggaaaagtgggtagctgagggttttggaacctggtattatgctaaccccgccccctggcaatgggtgggatatgcatattggaatttaggcagatacttgggcagctcaaagggctctgtgttgagtggccacatcacagctatgtcattcatcactcattaccacgctgcgtaaggactccgtacacatgtgcaagtttccccttgtaagcgagcacctccacgtgtttgccccttccttttgctctctccttttgcccccctctgtctctgtctctgtctctgtctctgtctctgtctctctgtctctgtctctgtctctttctctctctctctgtctctctgtctctctctctctctctctgtctctctgtctctctctctctcgccctctccacttctctctttctctctgctcccggttggccaacaccccccttctcttccctttcccttcaaactccacgtatgtttggtgactcctggttcatgtttcattgcccgttgctgcagcaaaagaacaacagagagcacttattattcttgcacaggacctgggtttggtccccaatacccacattgtggttaactctaattacaggatatctggtgcccacttctggcctccaagggcatcacatatgtgttgtacatagacaaacattcaggcaaaacactcatacacatagaataaaaataaataaatctttaaataatataaatctggatacatgtaagttattttgaaaataaacagttggtcttgtaactgtccctccagcctgtaggtagagggctatcttttgactatcaagctaattggattaataaatgtctaggggactagtgaaacatacatctgggagagtctgtgatatgttttcagtgatgattctatcatgactctgatccttgatgaaatcagaacatgaattcattataggcagtgatgaaaggtatgaggtagggcctacttgaaggaagtaggtaattttgggtatatccttggggactataagtagcctggacttctctattgttttttcatggcttcctagccaccataatattcagtactctgctctgtcatgtttgtctccagattggactgacacatctaaaactagaagctaaaataaatcttctctcttttaattcagatcttgagtcaggaagacacacctttaatctgggccacaccttctactgggagcctattcaaggacttagaagaaggaaactgatggagtagttccttctgtatgctgagaatatatgtttctcttactggtataataaaacactgattggccagtaggtaggcaggaagtataggcggggctaccagactaggagaatactaggaagaggaagacagggagacagtctccagggagatgccatgtagctgctgggaagataggatgctgggcattctccagtaagataaggccatgtaggaatacatagattaatagttgtatgttaataattaagagagagggctgagagatggctcagaggttaagagcactgactgctcttccagaggtcctgagttcaattcccagcaaccacatgatggctcacaaccatccgttatgagatctggtgtgcagatatacatggaagcagaatgttgtatacataataaataaataaataaaatctttaaaagaaattaagagagagctagccagtaagaagcccgagccatcagccaaacagtttataactaatatagcctctgtgcgtgtatttggaactgaagggcagcaggactaggcagaacagaaactcagtctacaggaagcttttcctctttacttacttcctctctccttgatagcaagaccattccttcaccagcattagaggaaccttctttgggattccagcatatactgaatatcagttgagacatccagccttgtggactaaccaactactgattctctcttttttaaaattaattaattttacatcatggccacagttcccccccttttcctcccagtccatccccccaccccaccccattgccatcccccaatacactcctttatttctgttcaggaaaggacagttctcccacagatatcaacaaaacatggcatatcaagttgcaataagtctaagcacctccccatgtattaaggctgggcaatgtgacccagtatgaggaatagagtcctaaaagtcagtaaaatagagacagaccctactcccactgtgaggagtcccacaagaggaccaaactacagaactgtaacatatatgcacagtgcctaggtcagtcccgtgtaggctccctagttgtcagttcagtctctgtgagaccctgtgaacccaggttaaaaatcaaaccttttaaaaaaactggttaatttttgctttttgtgttcattggtgttttacctatatgtatatctgtgtgagatcccctataactgaagttacagagagttataagctgttgtgtgggtgctgggagttgaacctgagtcttctgagaaagcagccaatgccctaactactgagtcacctctctagccctcactactgatttttttttgtggggggggggcgatgggtttcgagacagggtttctatgtattgctacggagcctgtcctggcactcactctgtagaccaggctcacagagatccacctgccttgcctcccaagtgctgggattaaaggcgtggaaccaccacctcccagcctacataaagcaaactgataaaagctgtccactgacactcatactctccagtcacctagtgcctcaggtttgcatttggaatacagactccctacttcatgttgggacacagcggcatggggacagatgcccatccatgaacactttgtcctgaatgaatcttgagttatctggagcctgcctttctgaactctgtccccctcacacagccagacattggttgcctaagggtagaggtttcacaccagtgattcggacttttccaaaggtcagatatggagacaaaggctgcagaacacacacaccacaccacaccacaccacaccacaccacaccacactacaccccccgccctagatcacttaaaaatatttaaagcattccagatggagcagtcaaaaggaattctggtggattcccacttccacagagagggatgtgtcttgggacccaaagcagaagctttacattattagtcccaaggccttccttctagctatgccctgatctctccccgctctcccctccaatgtcctctcaatcacgcagaacacaaagaatgttcgtcttgcagccaggaggtaggagctggtgtgccgggatccatcaagaattgccacaaatgtgctatcccattgtttcaggtggactgttctaaaaaagcatttgttcagggaactccagttcccagcaagctatgcagcctaataaagttgctttttattgtctttaaaactttggtagagtgtttaaggtcaagaaccatttagatttgccttattttcaaccacgatggctggcttcccttccctgggcttgttttgaagcctttggacttgcttagtcattgggttaatgtaaaattaattgcaaccacgcctttggttgttttagtaatatgcagcttgtcatttttagacactttcaggttataattatgcaaaacacgttgagaaacagtagtgcatttttattctccccagggacttattctttaagctgttaagaatttcagcatgtgtgtcaagaatcctgtcagccctctggcaacttgatgtggcctggctgggtcagggctccatgccattaaaatcttgctgttttcaaatgtgccctgaagttaaaggcattctggagctttgctcaagcagttttgctttagatgtatctgccaatacatgtgttccgggtcattttaaattattcatatgaaccatcatgttacttcttcctatttggtagctttcatgttcataccagatttctgacatcccttcaatataggcctaagttttcaaccacgagacatttacaaatcttccatgttagtttcttttgtgtgaccaaatgcttgagagaacaccttaagggaagaaatactcatactgactcatgatattaaaatttcagtccaaggtcacttggtttcatgtgcttgagtaacatcacactggtagaagcaatggaggaggtaactgctaactcatggtggacaggaagagaagggagagaaacaggaaggagccagggagataaccccaaggaccttccaccggtgacctacttcctttagtagaccccacccacaatgaagttttacctccccaatagcacctctgtggagggatgtatgctttaacacacagcctgtggggatgttttctactaagcctgcgaagctcctacggtgcaggtgtggatgcccacctctgtgaaaccctccttcattgacttctctggttcactatgagctgtctctcttggtctttggaactggcaatgagtttcactcccactgtttgcatttggtgatttgctattttactttgcttttcatgtgtgtacatctggttttcccaatgaagacacaagatctctaaaatgctgggtaaggcctgctggctgctcaggaggctgatatgggaccgcgtcagaccaagagtctgaggctggcctgaatgaaagtgtacagagaccccatttctaaagtcttgaaggaaaacatctcttcttatacatttctgttctcactccgcctactgaaatacatttaacatctatataaaatctgctgactaatttggtcgtgactaataaataccatttgcagaggggtggttaggaacacagtatgtgggatcaaagtggccataatatgtccagggaggcctcatagtcaggagatcctggggtataaaattgactgtttctctacccatgctatagagatgagaaagtatgtccctcgtggaactatttgagaacggggaaaatactgaagaaaaaaaaaatcaaacaaattagaattcaggaaaatgttaggcaaaatgataaactcttttatgtgtgttattggtttaactcattcacacctacaagggaaaaactattattatatgttttttaaaataatataggtaatctgagatttgagatatttactggaaagttatagaacaggatttacctcaggcaatgactgcacaatttgactgctaaccatacaggacactaagtgctaaagaaggtaatatcagaaactagtgacattgtccccttcaagcttcccaatgaacacaccagaagtgtaagggtttgtaagggaatgaatctactggtgtggaattggtatccagatttgttgggacatgtgaatgaccttggagggagtgttctcagatgtcaatgacaatttcatccgaatagagatccaggaaaggtgtcataagggtttttagtttccttgtcagcctgactggtttagaatcaccatggaaccctgcttctgattgtgtctacaagggtgtttgcagaaaggtttaaagaggagaggcctgccctcccggtaggagggtcctgaactgaagacaagagaggataagtcctttattccttaagctgcctttgactgatattttgtcatatctacaataactgttaagtaattaatacaagtgggggttagaacagacatctggctttacactgaattctgcggaagagactgcagacagttgagtaagcagctgtgctcacgaaagcctctggaacagaatcccatacagcctgattggaggtgaggaaccggcctgactccattttgaaggcaggagccattatgttgtattgttaaaaataagtctctgtttactgtaatagctgaattgctctctgtttcctggaacttgaccttccccaacctatgaccttgacttgtttttgagaatacccttaccttccatgacccaccattaccctccctgtccctccctgactctccctggcccttcttaaaccctccctatttacatgtgaccacgtgatgttttttgagatcccttattgccccattgtctctcttccgtaaacctgctttgcaactacttgtgaggacttctctctttaacctgacttaggaggtggttgttggtcagctcttgggtgcaccccaattaaaaaaaaaaaatcaagcttgcttcaaatttggcccaaattatggtagtggtcttattcttgctatggggatttacagaggacgggtgactagatttaaaagaacgagcttggctgggcttcaatataagctgcaaagagtgccactccatctaggtgtcccagatagttgccatggcatcctggatgccaacctctatatacttactagtgacccaggtgtctgtggttcaaaggaagagccccacatggcttcctggcaggcagaagtgggaaaactgaaaggcccggaggacttggaagactttcacattgagatttagttctactttcagcagatgtgtgttaagaagtggaacctggtttactgtctttgattcttacccctcccttctcccccaggtcatttgttaatgttccaactcttcttcatatcttaggtttgggagatagggccttggcagacctgattcaggtacagtgaggctgtaagggttgggcctggtccaatagtgttattatctcatagcagccagctaataaagcccaagcaagagtttgggcatgaggtatgtcctttaaggtcacttcagtgacctgcttcctccaactagactatgcctcctaaaggtttcatggtctccatcaaacagcacaaccagatgatttcctaaaagtgcttttaaatattcccaaataacggctggcccatgtcataaaatgataggaaagtgacgttcagtggggcctaaggaaacaaatagttctgagctgccacttcctaggcaagtacacaccaggcaaacagcgaaggcaaaggtgtgaggcagcaagagttctccactcctgtcagctcaaagacctcgtcctcacccagtgtcttgtcaaattggtatagaaggtttttcaaggtctattttttgtatccagtgaacaaatgaatatacaaatgaattcagtcctataaggagataaaaatattctttgctttttaaatcctagactcttcaaagatttttttttttccaagacagggtttccctgtgttgccctggctgtgttggaactctctctgtacatcagactgcccttaaagtcaagcctgcctcagcttgagtactggggttaaaggtgtgcaccaccaccgcccgagtcagatttctttgtttatttcatattcgaatttaaccaagtgagaaattcagaagtaaagattagatggaagaagccatagacccaagcagcaccagaacaatgatatgtatatgtgtgtgcatgtgcatgcgtttgtgtgtgtgtgtgtgtgtgtgtgtgcgcgcgcgcgcgcacacacacacgcacgcgctcctgtgtagtcagctcaccccacttcctcaggtgaggctgcaatgcctgtgtctcaggaagatgttctctggctgcctgaggaattagagatgctggagctcagagggaaaataaacactggcaacctcagaagcaatacaagacttgcaaaccaagtgggctgattttacagacatcttcagtattttcccatcattttaattatgcttaaaatagatcttcaaagtaaataactcaatgaatcctccttacccccctcaccaaaaaagtgactggtaagattataaacaacgtaaaacaaagtaagatgtccttaaacttttgggagcaacatttcactaccctttactatagaacattaaaaaaacaaccactgagtgatttagactttgataaagcattccaggataaagggatgtgttcttctactcttttgtgacttagcataattacaaatgttatacatacaatttggggacagtagagatggcttggtggttaagagcactggctgctcttccagaggactttggattccattagttgcaggagttgtgttgtggatgtatcatatgggctctgcaactctgcactatcatcagtcaatgtcctgagtggtctctgtctgttacaaagagaagtctccttgatgagaagtgaggactacacttgtctgtgggtacaaggatgactacttagaatatagttagggattgtgctggtttagtgacatagaagttgtaagttctccaagattcctgattgtactggccttgggagttggtttccagtataatgcatgatggtttgttgagtgggccttaagtccaattggagctgctggttaccaccagtgaatttgtgccaccattgcatccttacaggtgttgtagcatgctagtcattgttgtggttcctaggcactgttgctgggtagaattattggttgtttccctcctttcaaagacggcatggcagcttctggtaccctgaaaggtagtccttaaaagcaggaggctttcaggtcagattcagttcaggtaccctgggtaccatgtctgaagtgcacggtatctttagcagtagggacttacctatttttggagtctcttagacagccctgaccaacaactcgggaagagggtttctcatatctggtgttgaaatgtttgtagatggtctgtggctcttttgtggagcattggcggcagagatagggagtattcatttgtattatttgatttttttaaaagagattttgtctttgttttcaattatgtgtatatgtgggggtgcacttgaatgcagtgtccacaggggccaggaaaaaatgttggatccccattggagctggaactgcaggccatcgtgagccacctgacatgggtgctggggactgaactcaggtcctctggaagatcagcatgtatttttttgggggggggcagggtttcaagacagggtttctctgtggctttggaggctgtcctggaactagctcttgtaagccaggctggtctccaactcacagagatcctctacctctgcctcctgagtgctgggattagaggtgtgcaccaccaacgcccggctcagcatgtattcttaagcacagcccctgctcctttattatattttattaatttattttccagtgtcagagattgaatccagtgcttttctgttccatgataagcaaatgccctactactgaattctgtcctcttggttttcttcagtgctgggaccgagtccttttcaaaaataccgtttcgttttccctgaaacaaacccatcaagtccatcatctgaggacatctaagagggctttcaattacaatgtgtgtttctattcagtttgcagacagaaggtgcttgcatcttactccctgctattagaaacacagctttgaatatgaacaatctcgtgctgattagaggttttcagcattaagcacgagtctcagctgtaaactttagcaaataacagaatacataattgtctggcacgtccagtcctttcatgtcacaaagttgaaattccttctcctcacgtgacaaacaagccaaatgcatgctataatcaagggagcaggctatgattaaatttgcatagatctgtcttcaaactctctacaaactccacagaggtaacgagcagaaatatggcaaagcatctttttctgaaggagaaactgtctaattgagagcctttgatgttcctaatttttaggcgattagggatcatatggtcaggcatgcccaccctgtcttttctgcattattgtcacttgcttctgcaacatgaagatctcatttctgagaatctggtctttataatatggtggggaccattctgttcactggcccattcagcaataaggcacagaggcccttgctgtcaacctgcccaacaacatgttttccccatgcttgcaaaatctgtggattccacagtcatttcagtgagaaactgaagaaattctgccagaggaatgaaaggaagatcttgttttgtttttcttcccataatagggaagaaaaggaaagaaaaaaaaaatcagcacaagggaaatctacctttgcaattctgatgttcttgtaagactatgctactattccctttgcacaaccccacaatcttgatgacattatttccttcatttacaggagttcgaatggcaagtggcagggatcagcagccttcagaagccaaacagttcagccatgggatgcaccatcacatcagtgagttagaaacactcaaagcactcaggccattctggtagaatttgactgttctgtgtgactacaaatacaaagtgccatgaccctcattattcttcctagtgaggtaactgtggttactgtctggctataatgttgccccagttatggcaacttttatagaggaattaataagtggacaacaactgaagaggattctttttttttaaaagatttatttattatgtatacagtgttctgtctgcataccagaatagagcaccagatctcattatagatggttgagagccaccatggtgttgctgggaattgaactcaggacctctggaagagcagccagtgctcttaacctctgagccatctctccagcccctggagaggattcttgttcaaaggagatgcaccccaaccttgtctatccactctggccccaaccccaccctggcaagaaaaatgggaaatcggtataattgggtgtcagcaaattaactaattccaaaacctgaaatagtaacaggtgcagtgggtgaggttcacttagagtctcccttcagagtgagatttattacttcatctctttctgaggaggatgctaactgacagtcctcagagctggcccattcaaattcttgcccctacataggcagtctgcattcagcgattggtccacaagcctgcctctcctccatgcttcctgtggagccctgccattcctggtttgtccatggctgttctggtaagtttactttctttcctctgctcatacatgttcatatcctgagaatactctcaaatgcatgatttgaatgaactgatttccatctcagagtctgtttcccagtaaacccaaactgtgatatctcctgacttcttttttgtaggttctatacactgttgctttcctgcagttggaattagccagaggaaagtgaactgattatatagtgctgtgtgtgtgtgtatgcgtgtgcctgagtgtgtgtgtgtgtgtgtgtgtgtgtgtgtgtgtgtatgtgtgtgtgttttcctcatgaaatttttgaagacctagacactacctatgtaatagtccatgtctcacagacagacaaatgcagtaagacttaacaaataataaccaaatgtagaaatttccaagttggggtggaatagctgtgtttatagaatgcacaaatttttcacatttggtggtcagtgttttgggggctggtgggcaacctcagaaaatggcaactggtttcaggtggcagaggccaagcatgcacaggtgctgcaggcaacactgttgagtgcatgcatctggcttccccttaggtaaagccggaagtcaaggtcacacatcagtgaagtggtagtttttgttgactgatattccttacttcaaaaaaaaaaaaaaaaagacagacaaaagtaaaaaaaaaaaattcactatttgaaaacatttttgaaaaaaactgccttatcattatttttctttatatagatacttatttgtgtattttcctcttttgagaaagggacttactaggtctggattatgtagcccaggctggccttgaagataggatcattctgtcttggggctttgggcatttgtactaagaactgaacacagggtcttacacaagctatgcaagtgctttatgaggcttgactgcccctgtttaaatgtacattttaaaatataatattgtttatctattcttggacagtttagtatatgtaaacaatatatcttgatcacatgtacctgtatgttcccctaaaattttgtcatcagacagagtccctctacattgcctaagctggctttgaacttacgatgtagctcaggcagacctcaaactaaccattttcctgcctcagcttcttaagtaactggtatccaagcatgtgtcaccatgcctgacttcttttagttcttgctagaattggctgagaaagtctgttctagaaaataatgtcattgtcagatagactggggaattacacaagccatactgcactcttggttctaaaggtgatgctcaaatcctcacctcactgcttgtgaagttcctggcattgctcaacaatctttgtgtccccagaggccttgcatgaccaaggccaactcctggcccaatctcctgaaataattaagtcttaaaatttccccaggaaccccatgcccatgtaattacgaatgcatatttcactgttaatatgcatgtttcaggactttacaaaactgtaacagtgagacaggaaaaagagaaacttggaatttggccaaactgtaaataaatcgattttgtgtgtttccttacatctttatggggaaactgaggtgaatttgtggaactaagtacctgctttcactcctcttgctaaatgtgttgaatctgaggattgtcacggtcacctcctactattctgtttcttctgtgccatgtcagtgccctgtagtatttggaactcctttcctcctccctcctccctcctccctcctccctcctccctcctcctccattcatacccataaatactctcttttctctcttcttccctccctcccagctcacctctctctctctctctctctctctctctctctctctctctctctctctctctcagcattcttacacatacatgacaacaaagttttgtggaggtgaaagatttttatattcaaaaccaaacacacgagcatagtatttttccattcttgtctttgaagagcaaaactttcaatccttttcttcaggaaacaattcaattacagctcctgctgctgtcctctcctccccctttctccttgtcttctttctgcctctccttctccccacctctctcttttgagaggactcttactgtcatactatgcagctcctgctggcctggaactgaccatgctggcctagatctcactgagatccacctgcctctgcagtgctgggattaaaagtgtctgccaccatactcaactagtctactctgtttaaagaagagaaaagaatcaggagaaggaggggagaaagaggagggggagaaaaggaggaggaggaaaaagatgaacaggaaaaggaagagaagaagaagaagaagaagaagaagaagaagaagaagaagaagaagaagaagaagaagaagaagaagaagaagaagaagaagaagaaacaccaggtttttctcatagggaatgagtttgttctttcagatacttgtcaggtcatctggatagctagtgacagaaaccccattcaaaccagctttcttaagagactctattcagcagtgtaaagtaagagctgagagagggatcctgtttcgggtgtgggtggacatgggagcttagtgctagatcagttttccttccccaggtctgttggctcccttctccctgatcctggctctctctcagatgactgttgctcactgtagcatgatgttttcactaagtctcccgtcttccagcgttcaacacccatcaccaaagggtgggcctagttctgtcttcagtttcagcccaagtctgcttaagacaacacatggaagcctgtctctcagcctgtcattgtgacagggcagggaagttctgaagttggagaggtcaaaaccttgggaccagagcagctccttagagagacagcagctacaaggccacagaaaagagcaccgtggtagaacaacagtgggaaagtgacattcagtgtgtgcttgtcctgccccttagatgtctctcattctggatgccctgaaagttaaaaagtattgcacacaggacttgcccaattaagaccacagacaaagccatcctcttactagtgtagagtggaaaaattccctgcagttgccagaaatgttctggatcttgatggtggtagttatacttgttgtgtacatgtaaaaaaatgcatcaagctatactgaaaacttgtgttatttctctatatgagtagctttgtgtgtatagatctgttgttaaatttttatttcctgcaagattattaaatgtttgtgtgatttttttgaccatagcaatcaaacctattttctttggccagaagtgaagaagtggaggtcaggtcaccagggaagaccaagtaggacttggtcttcctctggatgtccttgcccaaggtctcttctgaatatatgtagtcgtgtactggatgacaatatttctgccagtgatggaccatacacatgatgaggaaccaataagactatgtcacctagtgatattgtagccatctttgtttaacaaaactgaatgatgacatgtgtcttagaatgtatcctcgtggttaatgcatttgtacggctgtattttgctcagaaaccaaatctgttgacatagaacacattcagagcctggaagaacctgaaagatcatgtctgggataaagacttctaagcatttccctaaattaactaggtgagactacttggacaaaaataaattaataaataaaactgtcctccgttatttacaaagtggtatagtcagatgcatttatataattatttgttattaataaaaaacggggagtctgatattgggctgagaacgtgaatgattagagtagcagcggagaagccatcagggaacccctatctcttccatccctccatccaaaagggcagagatcctctctcagccctgccttcctacttcctgtcttctgtcttcagtcctccaaaacctctacggttaattttggtcaactagtggctagctccaccctctgactcaaagcaagcttaattgtcagaatgcaatcaaaacatcacccatcaataatcaaagttattttcaacaaaacaaccacaactgactgacacgccttaatagcttattggggtggacttagactggaaaggttccattcacatcctggccactgccctcactagctgtgtgacttgagtaagtcttctgactgcacccgagcctcagttccacaaatgtaagtgatgacggtgtgcctgactttcagggaacccctgagaaaccagaaacaccacacaagaaaggtgtttgggtaatcagtgtccctcttgttctggtcttccatccatgcctttgaccgcattaatcaccctttgagcactcttaggcaatgtcccgaatggggctcttgtgctgtcatttcctccaagttaagcaattgctgagaactagtagagcaacatcttccaatctgctaatgcattgggacaccttgcctgagccacatgttatgtctttaagctgttaccttcacacgcttcactcaacttcttgtttttctggatcctttgttagtttgatcttctaatttactccacttaacaacattattcatatttgaaatctcattatcaaccgtttccaggtaaaggcagcatcctgatttctctctgtcggttttcattaccacatccttctttggctatacaaagagagatgaatagggaataattgtaatgggacagagaaggaggcaattttctttttgaaagtgagattactgttaagtaaagaagagcttgttgtgttttgctagttactagaagagaatgagagaggtgatttaataagaacggttgaagcatttgagaggttagctaataactttctgtccacacacacaacgtcttccagatgaaaggcacattactcaaaccccttatctgatttaatctcactgcaattccattaattaacatcagataactattgttttctcccttttatgcatgttgaaatggaggtgtgcacagataccatgaataaagataaaggcgtctacatcgaacacctttcccctcattttgtagatgctagatgggcctctaagcagataaaggtaaacactataaagatgctaataaaaaaatctggcttggaagccacagggcttgtggtcaagattcctgtatgctccttagctagtgtggactaggaagaaagaaacaaagaaactacagaaggaaaaatgtcaccttcctgttttcactgagggctcctctagattaatattgaattttaaaatatcggactaatgttgcttgtggaggaagttccattgagttcctaagaagaaaaatgggatgagcccaacaattaatataattaatcctagtgaaaattacagagcctaaggtctatctaagacaaataattgccacctggactcaaaggcctttgggaaattgtaattttataatgtaattacttcttataatattatgttaagttggaagcattcagaaaaacatctaagtatgttcttgtgagagcacatctgttgcatagtgataactggaataacatagttatcaacatttaaatggtaagtgactaaaatgattggcatgtgatatgtacaggtactgctttattaaattaatatactacttggaagagtgcacacctcagagaagcaagggaaggccttctgcctctctttattcttttggaaaagtagaccttcttcttgactgtagagtgctggagacccttttgtggtcttagagacactagagtattaatggaccaggtatcgagttagactgacaatccaatccagttcctattctgagtggtgcttggcagctgcatttacacccgggctgcagaatgtagcggccaccactgcatttcctgacccttttcagatccttttccctgtggccctacagatccatctcaaaagactaacaaaatatgatacacacaacatcaaaggggagctttgagatttaaaagccttgcattcgaatgttaaaaataacattagaaataaatcatgttgaaaaaaaattaggatgtcataaaagcatgaccagagattataatcacattctgaaatatggtgctgcccctctcgatgtgaaaagagatatgagggttagaaggaaaaggtctgcagtctacagaggactcagtggaaagaaagggcaataagcagagcctaaacatgttgaccatacagaaaaatgtttatcattttttatgttaaatcgtggtgtttataattaatggacatttgcttatttgttggtctggtaaacttgttcctgaaggtcattctaggaagtgtgacacaggttattttgaatcaagtctctcaaaggatgtgttatgaccctctgtgggggtcacacaactgaatgtcaaggtcatgaaaaagtttggcaacagtaaaaggtttctgaatgtacaatcaaaaattaattcaaaagccatcaggcagaggcagtgtttactcacattgaactgtatgactttacctcagccttgggtctgaacacacaactcatgcattttgcactgtgcatgtgctcaccctgcatgccaacagtgctgctagaaacagtagctcacatatgagactattgcacactatgaattgcagtgctttccctgcacacacacagttctatccatcgaagcatagtagcttaattacagaaaacaaagcttccaatgtttttcaatcatcattcctcagtaggtaagtataaaatgagtataaatttgggttgtactgtgttagaatgtctggttttaaatttttctttttgagtatcttacttgagtctcacccatactcacacatttactaaataaatttagatgggtttagtgcagaatttccaaccatttctgaaatggtcctaaacacatttctgccatttcccttcctgtgtaaggtcacagacataaaatcaaaatgtccatcactgtgaaaaaaaagtgtaaatactctacatcctgcacactcaactatccagtcagaataattctctgtgtaaaataaacaagtacaaccaccttgtctgtgtaaaatttttttaaaagatttatttactatgtatacagtgttctgtctgcatatatctatgcaggccagaagagagcaccagatctcattatagatggttgtgagccaccatgtggttgctgggaattgaactcaggacctctggaagaacagccagtgctcttaaccactgagctatctctccagcgcccccacccctgtgcaaaattttaatttttatctttaataagtactgaagatatatgtataccaaagaattgttttaaaataaaagtctgtgatctattgtcagtaaatgtttgatttgtatatctatcacagaacactatgtgccagggtagtgtgaacatttcttaggtacaaaatagtcttgaatggaagaagtttaaggatccctgacctagaggacctgaagaatgaaccttcgtgtgctttatttaagatgtctctcatacctaggcatggtgacacataactagagaaactgaggcagaagatcacaagctacactcccacatagatatccactcaccaagaccctgtttcaaaacaaaagcataaagaaagaatatttctaatatttcaagaaaaaaatactggaagggtttaagaagatgagaatgaacttgtatcagggttctatgtgtcatttagcaatgctggaatagcatccagaattctctcaatttaaggataaatcaatggcaccaaacaactatggcttcactacataacctagataagacacctcctcgaatcagctaccaggacaataatgatttgaaatgactgataactgtatcatatgcttttcttgcaatgaaatgtaattacaataagttaatatttatgaatctcattgaggctctcagatgaagtggagtgataagcaactcaataaatattgcataaataagtaattacccaagcaattaagacctcttaaattgtggattgtaaatttgaaatcactaattgcttcacaggacttagggccccagatgacataggatgtgatgctgtaaaatgaaatctattcccctctgatctgactttgaaaacaaatggaaggaatagagtaggtggggatatgataaaaatacattgtatgcatgtaagaccttttcaaagaatttaatttttttttacaaaaaagtagaatagaaaaaaagaaaacaaggccccaagttacccaattattcctttttattttttgcgtaccactggatatattttcaaaaggtatcaattcaatgttgttgatgtaaggacatgggaaattgagtacaattcttctgctgtgtgttcataggcagaaagtagataaaaagactctaaaacaggtctaaaatacttgatggtcactttaggtggaaagaaaccaacacaggatcccttggaccacaattgcccaagatgcatgtgttctatacagcaaatatacaaaggtagtcataaaagtttgatttttaaaataattttcttagttgtaatattatattaatgttatataaatagaaggaaaacagagaaaatggtgaataaacaatcaatcttttcacaattataaaaattaaaaatccagatcaactgggtatagtggcacacatctgtaatctcagcacttggaaagcagaggcagggggattgtcacacgtctgaggtcacctggtccacatagtgagatcctgttccaagacacacacacacacacacacacacacacacacacacacacacacacacacacacacacacctttctgttgctatgataaaactctgaccaaaagtaacttcaaagaagaaaggtttcctttggttcatggttccaggggaataaagtctgtcatgcatggcatagtggcaggaacaggaaggtagttgtgatcaccttgtcttaaacatagagggcagagagcaaaccagaagtgagatagggatttgaaccttcaaagcccaccccagtaatatacttcctccagcaaggttgcaccacctaaagcctccataacttctccaggcagtcccaccaactgggatcaagtgttcaaatacatgagcctacaggggtcattttttcattgaaaccactgcagtaggagtactgctagtcacgtaatatagaatattcacgaatgccatatgtttagctgttcatttagttccctgcggactcatccacaataataacacataaaggacatcttatgcctccctatctcaacttcattagaatgacttatggtaaaataagaatcagaaggtttttctttctaattcttcccaaagtaactatatcaaagttattccaacacatgagttttgagcctgagttcaagtcaaatgctaagaaatgtggccatttttctattggcttcttagactcttttacaatttctaagctaccactttcagaagcagagaaaaatacacacattagacaaggaaatttagttctgatcccaaactgcccagggctaacagagatgaagtgcttatgagcaaccaccacataagtgtttataaaagccttaccctgggtcgtcacatggtttgaaatgcttcttcatgtgtagtgacaaacactaggggacttgtaagtgaatgttgttaccactccctttccactgaggagtactgaaggatgggtgcgcctccatggttttcttctgcatggctgtttaaagtataaattatccagcggtttaagaaacaatgtgaagccacctttaaataaatccaagttggctctggacagtgttaaaccatctgagacttgtgcttggggtggaatggctgtcaagtctatcaaagcaagcagagaaggactctctactgaaacagagtggaaaaaggagcaacattcccataagaacttggagagatgacagaagcataaagcaagaggctctagatttataattagctctcatacttaggagctctgtggacctgggctatttacttaatgaccctgagcctgtgtttacatttgaagtgtggtaatgaaagtcgtggtacccattgggaaggttgttgaaaagatggaaaaatggcataggacgtcttgtagctatataaatccttatagaaacccctattgtcttttccatgggcatggcagtggtagtaaaaggaagagaggagtttaaatatttgtaaatatatttgctctgtagtagactatgccatataccctatgcttcccagcctccttgctaagattattaagaataagagtgttcatccagattcttaaattaacctgaatatttagttgcttatcctctgtgtagcaagcgaaatgtccttgtgcaaatgatagtgagcctgtatttgtgtttcagacacttgtcttagaccatttgggatgctctaacaatatacttacaaaacagatatttatttcataacactctggaagctgagaggtccaggatcaagtggccagcagattctgtgtgttgtgaggacctgtttttggcttcatgggtggggtctcttgctatggtgtcacatggtcgatatagataaggcaactcttagaggatttctgagggctctctttttcaagatttatttatttattgtgtgtgtgtgtgtgtgtgtgtgtgtgtgtgtgtgtgtgtgtgtgtgtgtgtgagtgggtgagtaaggagaaaatgttagatctcctccagctggagttacaggtggctgtgagctgcttaacatgggtgctgtgaactgagcccaggtcctttggaagagggaacaatccctcttaactgctgagacatccctccagcctgtgttcagactctgcttgtaggggcatttatcccatgtgcaactatcgtgtctccatcacctcccaaaggtctaatagagtaacaagggtgattaggtttcaatccgtgtgttttgaggagacacagatgttctgaccacagcagcacagggtggtggccggagggatgaggaatggcttatgatattagcagtcaagagttattaaaagttcacttggaggcagaaatctggtacaacttggcccatattctctgtaccgggccagaaaacaagtaccgcatttaacctgagagaaaactggaattcagtggggtcacacagcttgtttgctgtcacccaaaaattgaatggcagactggtcttgtcagggtacaacagtctgcttgccagggttctgagccaggattttatgtggtaaacataagagacagagggagctataaagatggaaatatttctcctagcctttcctgtacacccccccccccactgtttatatagacacagtaggttcatcttcccacccccataagaccctcaggatgagactaattacttgagtgtgaaaaatgtgagcccctcccaagttttaaaatagtaagggaaagccctgctgagagagagaatggggcagaggggcggggtgggggtgggggtggggggcagcattcgggacctcctacaacttctttcactgtgggcaaacaagcagccagagcagggcacactggggtaaaaatacagttttccagggaacctagaaagtggtgctttttaaaagctgcctgtcttgttttgttttgtttcctctctcctctcacctgtttgtccagggagatgaaatagtttgggtttgcaagctgtcgccagggaatggagcaagactttgtataacaaacaagaacacctgccagagcccccagcaaggagccagactgccaaggaaacctggcttggtgacaaggtccattcagcatgactggggtcactgaagagtctggctacttgctggggcctctggcagggcaccatcctgcctccaggagggacaaatgcagcttccctgtatgaggccctgcagagcctccgaatagcctaggcctgagtggttcagcacctactagaataagaaaagtgtgcgtgcctgtgtgtgtgtgtgtgtgtgtgtgtgtgtgtgtgtgtgtgtgagtgagtgtgtgcgtgtgtgcatgtatacatgtgtgttttcctatgtgccaagcacttgtggcaactctctagaaaaaaagatctagagccttcctcaaattcccaaggacacacagaacgtacaggagaactgcaagcagaagcagcatgtcctggggcttctggaaaagtaaggctaaggctgtcaacccactgtcctcttacgaaacttacaagactacaacatggggttgtgggggttagcactaacccaacctcttttctaatctaaccctaatccttcttaaacctcgcctggccctggctaacaggaaccatgccaatgccaaatgatatgctgtttattcatcccaggtctaaacccactgctcccgagctacagaaatcaaagagatctggaacccactgatgaatggtaaacagaaggataggcagaacccactgggccaggcttggaccacaattcttttgtgcaattccagctcaaataaggtcagggctcctccggagatggggttggagacaggcgcaggcactttcctcaagtagctgggaatgtagacacagctgctcctaatgggccctttcccctggctgtcctttcaaaccacaacagggccctagtgacagtgctccattccagacggctcctcagtcagttatgtttgtttgaatagcattttccagactgttctgagagaagcctcagatctacaccggtcaggtggagcagaacacatggcctgacccctatttttaccagagcagttgttttgatatgtgtgttttgtgtctgagggatttacaagagatgttctttggggaagaggagggagggggcaggactagaattctgttctgaaaactgccttgtatctggtgtattcttacctgaaagagttaaaatgggagaactctcttcaattctgagagctagttaattttccttctagttttctctgttgccctttttgaactactgtttcttagaactcttcataccagtatttgacagccctgtcctcacagagatcataagcatgagaatggctgggtgcaggcagcgccctctgagccactgatgtgccacagctcacattcactgtcctcctggtgctcaccggcacccggtgggtggatggtccctcctctgctctccatagcaacagctgcctcggttcacccagtccaagccagacttttagaaccaagttattgtcccagtgcataatgtggccattaatgttcagtgatgaagaaaggcatgtgtataaagaagatatacataattaatgattaataaaagagtatatcctgaagctgagagtagaacaatagcaatttcaaaagagctttttgccattctgcaaccattaaatttccctcagtctatttttatgcattgtttttagttctttgtatttaaaaatagctatgattatccaggcatattttattttcgttctgtagcttcacttgacaatgtgatatgatgatagtattcttatcattccatattctttttcttttaaatttggtgtgtgtgtgcgcgcacatgtgcacatatgtggaaaaaaatgacaaaagtgaacttaaagaaggaagggtttattgactcacaatttgaggattaggtccaccacgtaggggatgccaggctgacaggagttggaaacagctggtcatattgcatcttcagtcagggagcagagagcaatgccttgctgtgctccaatagccttctttttaggtagtccaagttccaagctcggcagacagtaccaccacttttaagtacctattcctattataatttactgaatccaaataaccactcacaggcatggtcagggaataacccaatctagatagtctgtcacaggtgtgcccaaaacccgtctcctaagtgactctagatcctgtcaagttgacaatcagcacagaccataacagtgtataatttcacatctgactccaagcaaaatgcagttctgtgcactgtctggcattctgcctaagatgcagattttcctcacccccatctctcaaggttgtcccaagaggagaaatagtgctgcagctgtcacttctgagtggtgcctgcatagtgtgcagaaccatttgtaaactgggtctctgacttttctttctgagtcaatcaatcatagaacatactccaagagaccagaaatatattcttagggacagaaaacattgtagctagactaggaatcttaggtgtagtggtttcactaggaatgaccaccccaggctcaaagatttgaatgctgtcaggctgaatcaagaagtggtgctacttgacagggattaggaagtgtggccttgttggagtaggtgtgaccttagggggggggagggtggggggggcttttgtttcaaatgctcaagccatgcccagggtctctgctttgcctgttgtctgcagatctggatgtaaaactctcagctactctccagcaccatgtctgcctgcatgctgccatgcttccttccatgacgacaaaggactaaacctctgaactataaacaagcctccattaaaaggtttctcttataagagttgctatggttatggcatctcatcacggcagtagaacatttactaagacaaagggatttagacaacttcttcacataacttacttacgttattgggacttatttgggcccaaacatctagtacttctgcttgataattgattgctggtgtacattccaatttgtgccttgatgtgtcagctgatacccagctcataatgggaacttcaggttggatgattatctgatagcccattgtccagtgttcaatttgtactaaagctcatgtctctcaaagggaagacagatgtctgcagatgatgttaggtactcgctcccctgatgacctgccctccataatcccctactgcaatactgcaactggcaagccatgatgcttcgggcaagtctcttgaagcaaatgtcagttcagagacagtgtcttataggcccccaaatgttgaactattttctttttaatcagtgcacaattaccctagtaaaagtctgtaagtttcttgggaaaaaatgggaggatgatttatagcaagtcccttttccaacaggaccttcttcattcaaggaggtatggattcataaactgcttcaaacctggaattagttggtgggtcaagagttttcgttgctgattcaaagtagctctttagtcatttgctctggaatttttttatttataaaaatcaagcaaaaactttgtaggcatcctatatatttcattgttgtgggatatgttgtatgttttgtacattgtaaagacgtgtctctgcccaagacaccttctgattggtttaataaaaagctcaatggccaatagctagtcaggagagaataggcaggacgtctggggagggagaggactctgggaagaagagaggcagagatgccagtgagactaggatcaagttggacataaaaatgaaggagaggtaaaaaaaaaatactcacatggcagaatatagattaatagaaagagttaatttaagatataagaggttgtaggaaaagcctcagcttaaagccacgctttcataattaataataagtctccatatcattaataatctccatattattctgtgagctggcagcccaaaggaaagttcaaatccattcatttctgggaatattctgattaaatggccaataccaatggtatacatgagtcaaaacatgataagcattgctttacccatggcatccaatatgataaggatactcaccttgatggtgctcattctgtcctgccacttgatttttgctattcttttctccaactaggcctgttgcatttaacttatgcattggaacagccacatctccttctatagtgactgggacaaagactagaataatggaagagttttttgagtatgctggtgctgcatcccccacccccatctgtttctttctgatactagcaattgaggaggattaggtttagagaacaagttcacagcgaccttccaatcttcctaatcctctgaattcctccactgacattaaaccaaggtatttcagatatctctagttcattaacagtcatcttttcacccaaagttcgaacaaccaatcaaataaacagcttgtgcctttttctttttcttaactgtgtgaacttcaacattaaactcagaatttctgcccagtgggttcacattcataaactcaaactgatttatttatttatttgtttgtttatttatttttggtccctccactataatctcatttccttaaaatccattcccaaaatatacctcagacttctgcttgtatggtctagagaactcattaaattctctagtagtacagtgttcctcctcatggattgcaatgtgcacctcacctctaggagcctgttgagcctcccatttgattataggtctagaggctaaaatggttgggcattgaggggcatctccttcagggaagatcaatagcagttccatagacaccctatgattaattctcccaggaaagggcagaggaagcaatactgatggagatacatcctctgctaatggtgagcccctgtttcctgtgtgtttgtggggagaagatagatgtatcagaatctgaaaggtcaatgccctcagtcatgtcccacacatctcttttcccaagttacagaatcttgctcccttcaaattcatgccttctctgtaactgctgacaacctttgaggctgggacttaaacttgaattgtaaacgagccaattgtatgaaagagacctgggtttggcttttggtaatgtcaaccctgtggctgtgttgtggatcagttttttccaaagttaaaaactttttgtcttagatggaagctcattaagaaacaagatattaaaaggggaggttaaaaacaactggatgttctaagagataaacttgttaagacatagggtttttataatataaacgatgggatattccaaggggaagtgagacatcctatagggaaaattgctaaatccgggttgtaaagaactcagtgacttcaggaaatccttgaaactgatcagattcattaggcccgttcatccccaagcatatataagctgtaagggcacaggctagccaagctgcctagaagctcagactgctatggaataatccttctgtacactatgtgaatatatgtcgctatgattggtttaataaacaagctgactggccaatatgtgaacaggataaagttaggaaacccaaactgagaatgatgggaaaaagaagggcagagtcagaggaatcgccagccagccagagacagtcagacacacaaaatgggatagaagtaaaaagccatgagccttggggcagcacacagatgaatagaaatgggttaagttgtaagagctagttagtaacaagcctgagctactggctgaacatttttaataagtattaagcctctgagtggttatttgggaaatggctgcccggacaggaaaactccacctacatcagaacacctgagttacctgggatgaatggacaatctccaacctgttgaactgcctgccagttgtacagtgcattccatgtttccaacttttatgagctttcaagcatgctgaggtgcacttttggtgatacatctgtctttgagtcatttatactcctgtgaaaccccatgtgtatgcctataaacaaccctgataaaactccttggttcactgagttgggctttggtgatattcttactttattttctccttgattccttatctattgtcagtaaacatttatccgtgtctccctaagaatagtgtcacccaagaggctactagaaggaagatttttctctcccagagcacaggtaggaatctttagattgtttatgtgcatctggaactgggaaattccatgtctgggttcattcttttctttgtcactttatccagagatactagaagcgaccagccaacatcattattttccatgctttcccacaaattccttgctcctgacaggggttgtgattcaggagtattaacttgggccctgggcagatggtaagtactattagaaatccactgaaatcattattagtgttagctataagtccttctcctcacactccttctcatgtgtattttcctgtaaaagagcacagatgttacaagagggcaatttaacctcttagttagcaactgctggacttttccttaactccctggttaccttgaacaaaggactagcagtggaacagtcatacagaggacctttatgcctgggccagtggttcgaattgctccaacgatgccttgtaaacccactcagtgatcacagctaagtgctccagcctctgaagtcacagcctcagccaaggctgtcttggtttatagaatacttcctgctaccataagccttagcggattcgaagggactctgcagccatttctatgtaggacagagatggaaacttcctctggtggtttagcaaaccagctgccgtgattggcagtaaaaggccaagacctcaattggcataagcatgcatacatacatacatatatatatatatatatatatatatatatatatatatagagagagagagagagagagagcatgattatgattggtctaaatatcccccatgcttctcttaagtggtcttttcttacctgcctttggagatgcagggtaactcgatggcggagtggcagcgactgtagaactggtagagtgtcagttggctgcatcagctgagcagctggaaggccaagctgcaaaagcatccaggcagctagctgctgcttgatagctaaagcaagagccaagcaggtggtaggccaggttgcaaaagtggtgaggtggtaggctattggcagctgaagaagaagcccctgaacagctcaagtggccagtgcccaaacaaaagacagaccagaagtagagagaacagagagttgatgctgaaggagagacagttgtaaggagttagagaaaacaaagcacaggccctggtcatgtgaagcattcctgagagttcttaaaccttcgtttcactcatttccttggccttggagctatgacaggatggctatgtcaaggatggagggattgtagcatgtatttctccatggatgtaaccaactgcagctgtggattaaagaatcacgacttcccaggcttccccccagctattctacttgcagaactaatggtgtcagtatctgcagatagcacaaaggatctaacagcagagggtaccacctgtggccactgctgctgtctgcttgctgccacagcttgcagctgcaaacactgagtcttacaaaagctgcctataaccagtgcttgaagagtttctccttgctctgcgtggatactgcaaagggaccttacctggctactgttgagagatttgactctgatactatcacccgtaactacagtcttgaatgagttattaactatgtcccatggcaatatttgagactagagaaaaatcttagtcaccaggtgagtttcagagacaatcacctacgcttgcaagaaaaaaaccagagtcagccccaagggactataagctagcctctaaagttgccttttgtttccaatcagggccacaagacaaacttacatggtgacctagaatagaactctatacctggtaagattttttgagtcttcttgtcccaccctgtaaggcagtggttccaacctgtgggttgcaaactgtttggggatcaaatgaccctttcacagggatagcctaagactaccagaaacacacagatatttacattacaattcataacagtaacacaatcataattatgaagtagcaacaaaattttatggctggggggtcacaatatgaggaactgtattaaagggttgcattaggaaggttgagaacctctgctgtaagatgacctagaagtgaacgttgctccttacaatactaaatctccacccagaggcatttcaaactgccactgaaaaacaaacaaaagaacaaacagacagacaggtgatgtataaagaggcacagcatcatgttgaacacactcaagaatgtctctgctcctgcgcgcgatgatgggcctgtgccaagtatgtctgaacttcttcagtagaagccccttgttttccttgcttgggaaatacctatgtggaataaatcctggagctctctcgtgaacaatcaacctctcttgactctttttacctcctgatacattttaccatcattctcaaaagccttgcatgtagttatacaaaggcactcagcagagttagggtaggggtagtaaaattggcaaaatggcaatgtagaggtgcacttgctgcatcaatagactgaaacatttggaaagtatatagaggaccagtgagatgtttcggtgggtgaaggtgcttgccaccaaacctaatgatccaaatttgatctgtgggacccacatggtagaagacaaggacaaattcctgtaagttgtcctctgacctccatacacatgctgtggcatgcatatctcccccataattaagcaaaagtgtgtgtgtgtgtgtgtgtgtgtgtgtgtgtgtgtgtgtgtgtgtgtgtgtgtacaatacagtcagagctaaagagaactaaccgtatgatgagaaagagtgtaattaagctggcataaagacaacataattccttttcattggtacctaggctctacatgaagtacttattaatcataccaatagagagactacagtttttattcaggacagtactcatggcatatacagtattgatatacctggtatggtaatgactaaggcttccacaataaagttgcatagactggatgcctcagatagaggctaactttcttactgctatagagcctagatgtttggaatccaaggctggttatttgatagtctttatccctgatatgctgatggccaccttctgtctgggctttcatacagtgatgtctctgtatatccctatgtcctataaggttttaaggatggcagccctactgaattagagcttgacaaacttgttttgacttaggtccctcattcaggacctctatctgtaaagacagtgacactttgaaggtggtggagtttagggatttaatctatgaatttgggggtgtgcaatttagttcataacacataaagaactctcctgaagaacaaggcagtgctattggagggtgttccatttgcatgagtaggaaatgacataatatttagtagttcctcagtagaacagagcttgtaaacaagacacaatggccgccaatggcaggctcattccttgtccccagccctgcctcagtgcctgccctgagttgtgaggctgaatgaggcctttctgacttctgtctttgagagttaaacctgaatctgctgtaagaaaaagcaatacttttccctttctctgttctagtcccattttgtttctgtgacctgtctcctaagacagaataagaagagaaaataagtcatgaaagagaaaagaatttttattgtgttgtctctgggcagaagtgacacggaaacctctatgtgcctgtccttagttgctgatgcagattacaattatcccctcttgaagtgggaaagggatccagaatgttctttgtgagaatagcaccaagaaggaggtatgcagagtataaaccacagctgagcaaaatatctctgtgcaagaaaaagataactccatatagggagccattatggggctatgaagaagaaacctggcactaaagaaatccacaggaatccacaaggatgaccccagttaagacctgaagcaatagtggagagggtacctgaactggccttcccctgtaataagattgatgactacttaaattatcattatacaacctttatcctgcaactgatgaaagaagatgctgagatccacagctcagcactggacagagctcccagagtctagccaaaaaagagggaggagtgataatatgagcaaaggggtcaagaccatgatgggaaaacccacagaaacagctgacctgagctagtgggagctcactgactctggactgacagcaggggaacctgcgtaggacaaaactaggtcctctgaatgtgtgtgacagttgtatggcttcttgcagtctgtggggccattggtagtggggccagggtttattcctagtgcttgaattggctacttggagcccattctctctggagggttaccatgctcagcctggatataggggggagggccttggtcctgcctcaaagtgacgtgggatggggagaaggtgggggggagcaggaggacagaaaggagtaggaactgggattggtagtaagaccagaaaatattgttttaaaataattatctttgcccaaagccagatagtgaacatttcagagctctatgcccagagcaactctgccttgaaactctctagctctaccattgcagcacaaagcaaccatggttgaaaaatatcacctatccaatagaattgtattctccaaacaagcaatagggcaccttcagtctatgggcaaattggccaacccttataaactaatattgtgtgtgtgtgtgtgtgtgtgtgtgtgtgtgtgtgtgtgtgtgtgtagtgagcccagatttatgataaactatactttttgttggttttcttagtgaattacagatatctgagtataagtcacagttcagttcctttgaaatatttccatccatgtcccacagactctctgggtgggaggtcagctcatctgtggttccctggtaattcttcccagtgctaatgtttgagaacctgtgtccagcatttctaatttcagctccaatccatcaggaaactattttcaccttcatgaaagggcccagggaaataacacctaccctaaccccccttgttaaccaaaagggagcaggctcgcttatttttttggtagctgtcagttactaaaaggtaattcatgacattttttcctcccccaaggaatggtttagcagcaaatgcccccctattagcctaaccaattgaagaggtaatcatgaagccaacaaaacttagtttttgacaaatgttagaactagatgcctgtatcatgagagaaatgttgaaaaaaggcttaatttgcaaacctcagacaattctttgttttgggttctccaaaatgcataagtgtaacctaggcagagttaacactaattggttagctctgaacttaaaggactgcaaaattgttgtcaagtaattagcaaaaatccttgggagagcaagatttaaaaaccgtatgcacagatggctggggaaacattaggcaaagtcaagagcataaacttttaccaaggatcaaatgggcgaattacatcagcacaaattcttccattgttttctggtaggcttcttctaaaataggaaccaacaagcttttctgtaaatatgttaggctcttcagccatattcaaagaactcagctctgcagttttggtatgaatacagccatagacggtattcaacagtgagtgtggctatgtatcaatagccctttgttgatgaaccctaaaatctgaaatttttacaatttatctttagaagtcaaagttttctttcaacatttccccctcaataactagcaaatataaataacaatcttgctttagaatacatacagacacaaatggcctagatacccagtctaaaaacaaaagagtttgctgtgtgtaccaaccgctctcccatttcttttctacatttagtcctgtaactccttttatattctacacatctctatgttcacaccatggtgtctgtactacctcaattctcaagtgacttcttttcctcaaagtccttttctacttcctgatgtcccccattatttcagattaacattacattgtggtccaagttgttttatttttgtagcttttgtggcaccgagtataatgcacagctttaataaatgttttttgagccagagaaaaaaagcacataggagacagcaaaggttaccacaagctgaagttatattccttttgcttcaaagtcttccgtttgtggtaacctggaatgccaaatgctgtgaagcctatatgatactcaatagaccgttcctccagctggattagtatattttcatctaaactttatttagcatttattctgtacaggtttcataaagtatacatcaaacttctggagcaatcttaaaaagcaggtgtggtaagactccttggctagtgatagaaccagagctgagcccaagaattctaacccgtctccttttcttcctcaccctacctgttaggtttcccttcgcttccccattacatgtcccaaaccttaggaagaaggaggaggttttgcttctgaagtttttctttagagggtgaaattccccaaactggatttttccatcccagtgtcctattattggttagacaaggacaggagagtctgctgctcaggttgcagcagagaaattgtgttttcattctcctctttaattcttgttagtcatcacttctatcctccatctatttttattttctagaggtggaaagcatgttagccttcaaagggatgcagcttcatgaaagtctgtttcaccaggcaacatttagcagccatagtttttattttcccatgaggaaaacagtaaggggagaaacaatgctagccagctctgggaaaatgccagtattggaagtctcagcctattgctggagagttacagaaaacaaaatgtccagtggacattgacagtcttacagaagaaggtcctgtgggccaagttctagtctcacaggtggtgtcccccagggaaattaagggtatgagagtccctgcctcaagttaaatatcctggggtggtataactcaagcaaataaaccccattgagacttagtttctgctttcaccaatgccaataatgcatatcctgtatagataacaaaggctggatatttcttatccaaaaagcttcaagtgaaaagcatgtctgacttcagattattttggattatggaatattataaacatactaagatatcttgggtatggaactcaagttcaaatatgaagtcatttcatctgtgctttaagcacaaggtctaaggataatgcgatactattttcttttgcttgtagtgctgaaggctgaaagtagagcttcaagcatactagacaaaagctctagcactgagcagcatcctgaactccagattttatgttaggttttcagcatatattatgtaactgcattgttcagatgaggtccagtgtaaggttttttatttgttggtttttttgttccatcttgtgagcactcaaactgttccagaggctgaagcattttggattccgggtcttcagatcaggagttctcaagctacattcatgtaaaaacactggtccagggaagcactgttgtcagggatttagctactgaaacttgcctttgagcctggagtgagagctctaacacactccctccccttccattttgtccaaatggcagcctcgccattttgtccttgttaacggtttcttttctggacgtaacgttgtcacttcattagtttttgagaaactatctaaaggctcaaggtagaataaaataagaatgtctggggctcgagagatggcttagtaattaagagcagttgccactcttgcagagaggttccagctcagttccatcacccacaaggtggctcacaaccgtccctaactccagttccaggaaatctaccctcttccggccttatgggcaacaggtgcacatatggtacacctacatacattcaggtgaaacacttatacacataaaataaaataaatgttaaaaaggaatgcccaaagctcacataactaacccaccattgaaaataatttacaaaataaaagatagctttggaaaagagaaagctttacattaacaaaattaagatttttgcgtctgtgttctgacccaggttgtttcataagcccagcccagaaacatgtatcgagtgccatctcattacttaatgcctctcgtctccactcctgctgtcttctagaagcattcattatctcaatagaacttcactgattattgaggcattattattctgctgcttttactgtgacctcttcatttctgaagtcactccttttgcttccaagatgacacactagtaagaatactaattctctctcccgtagcccccacatgtcacatttgaaaagtcagaatgtatgatatcattaatagaaaattagcctaatatatgcatgtgtggaaaggtcactgtgaaatctgttaacatgtacatattaatatgcattaataattatagctaaaaattatctacttaagaaagaaagtaattatggtaacacagttttggtgaaaatagtcaacacttccttccactacttttattttgaatgtagtctctatcactttatttttaattaatttttacttaaataaaaaaaatcttcttttacaaaccaatctcagttccctctctctctcatcctttccttctgtccacagtctccccatccactcctcatggagactgaggcctctcatgggggaaccataaagtctgtcacatcatttggggcaggagctaggccctccctcatgtttctaggctgagagagtatccctccatacaggatggtttccaaaagcccattcatgcactagggataaatactggttccaccgccagaggctccgtagactgcccaggcctccaagttcaggggtcctggttcggtcttatgctgggtccccagctgtcaaactgaggtccctgagctcccacttgctcaggtcagctgtttctatgggtttccccagcatggtcttgacccctttgctcattactctgccctctctacaaccggattccaggagttcagctcattgcttagccgtgaatcttcgcttctgcttccatcagctactagatgaaggctctatgatggcatttgaggtagtcatcaatctcattataggggaagggcatttaagttagcctctctactattgcttagattcttagttgggatcatccttgtggattcctgggaatttccctagtgccagtttctcgttaagcccataatggctccctctatcaaggttatctctgtccttgctctccttctctgttcttaccccaactcgaccttcctgatctctcatgttcttctccctcctccactttttccctcctctttctcctaactccctccccctcctgccatgctcccaatttactcaggagatcttgtcctttcctcttctggggtgtgggggcatttatgtatatatctcttagagtcctccttgtttcctagtttctctggggttatggattgtaggctggtaatcctttgctctatgtctaatatccacttatgagttgagcacataccatgtttgcctttctgtgtgtgggttacctcacttgggatggtttcttctagtttcatccatttatttgcctttgaatttcaagatgacattgttttttactgctgagtagtattccattgtgtaaatgtatcacattgtctttattcattcttcagttgaggggcatctaggttgcttccaggttctggctattacaaataatactgctatggacatagttgaacaaatgtccttgtggtatgaatgtgtatcctttggttgtatgcctaaggggaattgctggatcttgaggtagactggttcccattttcctgagaaactgccatactgaattccaaagtggctgtacaagtttgtactcccaccatcaatggaagaatgtttctctttctccacattctctccagcataaactgtcattggtgtttttttattttagccattctgacaggtgcaagatggtgtctcagagttgttttgagttgcatttacctgatgtctaaggatgttgagcagcttcttaagtgcctttcaaccatttgagattcctctgttgagaattctctatttagatctgtactccaattttaaattggattatttggtgttttggtgactagcttcttgagttctttatatattttggagatcagtcctctgttcgatgtggggctgatgaagaccttttcccattctgtaggctgccattgtgtcttgctgactgtgtcctttgccttacaaaaagcttcacagtttcagagggtcccatttattaattgtctcaatgtctgtgctactgatgtaatgttcaggaagtggtctcctgtattgactcattcaagggtatttcctactttctcttctaagaggttctgtgtggctggatttatgttgaggcctttgatccatatggacttaacttaagctttatgcagggggataaatatggatctatctgcaatcttctaattgtcagcatccacttatgttagtaccatttgttcaagatgctttctttattccattgtataattttagcttctttgtcaaaaatcaggtgttcataagtgtgtgtgttaatatcaaggctttcagttggattccattggtctacctgtctgcttttatgccaataccaagctgtcttccatagagcttgaagtcagggatggtgatgcctctggaagttcctttattgtacagagttgttttggctatcttgggttttttgtttttccatataaagttgagtattgttctttcaaagtctgtgaagaattgcgctgggcttttgatggggattgcactgaatctgtagattgcttttggtaagattgccatttttactctgttgatccaacctatcaaagagcatgggagatctttacattttctaatgtcttttttagttgctttctttaaagacttaaagttcttatcatacaggtctttcacttgtttggttagagttaccccacgatattttatgttgtttgtggctattctgaagggtgatgtttctctgatttctttctcagcccacttattatctatatataggagggctactaaccttttgagttaattttgtatcctgtcacttcaccaaaggtgtttatcagctgtgggagttccctggtagagttttttgggatagtttatgtaaactatcacatcatctgcatatagtaaaagtttgacttctttccaatttgtatccccttgatctccttttgttgtcttattgctctagctagagacagttgacagctttgtcttgttcatgattttagaggatcatatgagtttctctccatttagtttgatgttggctgttggcttgctgtatattgcctttatttaattagatatgttccttttatccctgatcgctccaagacctttatcaggaaggggtgttggattttgtcaaaggctttttcagcacctggtgagatgatcatgtagtttttcttttgcattttttttatatggtcgattacattgacagattttcatatgttaagccatccctgcatctctgggatgatgtctacttgatcatggtgatttttctgatgtgttcttgtattcaatttgccaatattatattgagtatttttgcatcaatgtccatgagggagattgatctgtagttccctttgttagttgtgtctgtgtgtggtttgggtaccaaggtaattgtttatctgatcttgatttgattttggtgatacctatccagagaactgtccatttccttaacattttccaattttgtggagtacaagatttcaaagtttgatctgatgactctctggatttcctcagtgtccgttgttatgtcccccttttcatttctgattctgttaatttggatattctccctctgccttttagttagtttggataaaggtttgtttatctaattgatttttctcaaagaaccaactttttgtttcattgattctttgtattgttttctttgtttctactttattgatttcagccctcaatttggttatttcctgtcatctactccccctggatgagtttgcttctttttattctaaagctttcaggtgttctgtttagtccctagtgtgactattctccagtttcttcatgcaggcacttagtgctatgaactttcctcttagctttcaaagtgtcccataaatttgggtatgctgtgctttcattttcattgaattttaagaagtctttaattctttatttattccttgacccaggattgatgtaactgagtattgttcaatttccatgagtttgtaggctttctgaaatttgtgttgttggtgaattctaactttaaagaatggtgatctgataagatacaggggattattccaatttctttgtctctgttgtggtttgctttgttgccaagtatgtggtcgattttagagaaggttccatgtggcactgagaagaaagtatattcttttgtgtttggatggaatgttctatatatgtatgttaaacccaactgagttataacttctattcgttcctttatttacctgttaagtttctgtctggtacccctgtccagtggtgaaagtggtgtgctgaagtctcccactataagtgtgtgggttttatatgtgatttaagttttagtaatgtttcttttacaaatgtgggtccctttgtatttggggcatagatgttcagaattgagacttcatcttgatggatttttcctgtgacaaatatgaaatgaccttcttcatctcttttgattaattgtctgtatcactttatatagaatatatgtatatgatttttcttcttatagtgatgactatagaatatagcatgatctactctacacatctggtaacacattttaaaaaatgatttgaagccagaggagagttaattaattgtgctgctgcagtggtgaattcaacacagaaccatgaatctaaagtcccaaatctttgtattctttcaaaaaataatttaaaatgtttatgtgtctgagtgttttgtctgtgtgtatgtatgtggactacatgactcccaggtgtcaacagaggtcagaagagcatgctgtatacccctggaaatggatttaaggatgggtgtgaaccaccataaagatgctcagaactgaactcaggtcatctgagtgagcaacaagggttcttaactgccaaaccaactctccggttcagtctatttattctcaggtttatggtagactttagcctcccatgacaacatttaaaatcactgggtatccacatggttgtcattgtctatctgcttcttcagtgaaactgtcaatcttagtgactcgatgagattgagagccatttagaaaattggtaagacatacatctagctgtgtttaggggagtgtttctggagatgactggcctaagggtcagtgaactggagtagaagccccatactaaatgtgggaagcattcagtagtctgggaccctagctggaataaaaagtggccaaaggggaaaattcacagacacccatgctgactcttcagggatgggagctttcagacatcagacaagattctttggcatttgaatgcaagcttgcccccgtagttctccagcctcggactaaagctgcatcattgcacatatttgctctaaagctacgtggctgttgaactaaacagctgctagttttcttggctctctagtgtgcagaaagccattgtgcaagctaatccagcaaatcccctgcataattccgttctacctctctggtggctctcctccttcggagagttctaataaattattctgcttagttccacttcacatcaagagtcatttcatccataagaaagctgaccctcgacatagatcctatagagtgttccctgaaaattcatctacaagatttgaaggatgtggaggtgagtctcagctcttacatgttaagattttatattttgttaaatctcttcactcttcacaaaaacatcatgtgccaaggactggatcctctgttggaatgacaatttcttgagaggcttgagtgtccctggcattgggtcactacccagaaaaggaagacatgtcgcctttccaatgcttccaatgctgcacacagctctgtccctttggaccagaagatggatgcattctgtcacagaaatgatgcatgaggttagagaaccaagcttcattttcagactccacttctgccggctttaccacccttttaggaaagactgatttttttttcatgaatgagtgtttttcctacatgtgtttatgtgcaccacgtgtgtgcctggtgttagtctagagatcctgttcaggtgcgtatttttcttgcaattaaagaattgaaaggcaggaaatatctcaagcacaactgattgattaataaccagaaaattcttaaaacacagcaaacagaaccaacaggttaagaaagaggttattttttatgtttttttgaggcagggtttctctgtgtagccctggctgtcctggaccttgccttgtagaccaggctggccttgaactcagagaactctgcctgcctctcctcctgagtgctgggattaaaagcacccaccacaacttctgtcttgagaaaggcttttatgagaagtaaggcaatgcacacagagcagcacatggaaagaacgacaccctgcaaagcagacaggaggttcagaagcctaaaaatacaggattttgtgtttttatttaaaattcatttaaaatacatttttcatacaatctattcagattacagtttctcctcctccagctcctcgcagtgatttccacctctccacccacccaaacccatacccattctttttctctcattagaaaataaacaggcatctaaaaaataataatgataaaacaaaattagataaaataaaaactagcaaaccagaataggacaaaaaaaatggggaaaaaaggagccagagaaggagcacaagaagcccataaaaacacagacacatgcatatttgtagacacaaatcccattaaaaacaaacctggaaagcatactatataagcaaaggacatgtaaggctaaaaacaaaatgaaacaaaaagacaaaaaaaaaactcacaaaaaaccaaaaaacaaacaaacaaaaaaacacacaacaaaacaaagaattatgagttaaaaacaaaacaaaaaccttaagaaataccattaaattcattttgtgttggccatctaatagtgggtctgggacctgcccagaaatgtggtttgtatacccagtgatatgccattgaaaaaaaaaaaaaaaactagtttttcccttacaagtggtcatcaattgggaattgcttctgggttaagaatgagggtgtgtgtccacttctcctgtcagcttaaggacccaatctgataagacccatgcattcactgtgcatgctcgcacagtttctgtgagctctcttttgtgcttcagtcctgctgtatctagaagatcttgtttccttgatgtcttccatctctattgcctcttacaatctttctgcctattctgaagacttccctgagctcagaggggaggttttggtggagacatttaatttaggtctgaatgctccaaagtcattcactctctgtacattgtccagttgtgggtctctgtatttgttctcatcctctgcagaggaagcatctctggtaatggctgagcaagacattgatctataagtataacaaaatgttataagtcagtgtattgttatattcctttgaaaaaacaatagtatttggttttcctctaggcttgtgacctatctagtctcaggttcttggccaccggaacctgggttccatctcatgaagtgtgtcttaaattcaatcagatagtaattggttactcctacaaactttgtgccactattcaccagtgcaccttgcaggaaggtcaccattgtagatcaaagggcttgtagctgagttgatgttaacctaactcctctggttagcatgtagaataccttccagtaccatgatcactagtcagtaggggtgaagtctataaataggcaccagatcaacttctccttcttcaatgagttatttaggtgttatcttcaacaataggaccttgccaccagtttgtagagagcaaccagtagcttcaacagtagtctggattgtttgaggaatttccatggggcccctttgcccaacaactcaattagatataaaccattcctggctctggagatttcatttggtggagagagatgtctagtgggggctttgtctctcccattatttggtgattccatttatatttctttcatatatgtacatattttaagaagcttctattcactttccatatgcccctcaaatgacccttagtagctgtcgcttcctttacttcctttctcctcctttcccattccagttcccccatccattcctaattatctgttctatttccctttcctagggagatccttcccttgctctataactaacctctgtggttatatggattgtatcctgtttattgaagacatggcaactaacatccacataaaagtaagtacatatcatatttttctttttgagtcttggttaattcagtcagaatcattttttctagctttatttacttacctccaaatttcatttttaacagcttagcaatattccattgtgaaattttaccacattttttagtcttctcatctgtttgcaaacagtctgtttccaatttctggctattatgaataaaggagcaatgaaacatggatgagtaagtgtctctgccataggatgtagaatcctttgggtatatgcccaagaatggtatagctggattttgaggtatattgattcccaccttccagaagaactgctatactgatttccatagaagctgtacaagtttgcggtcccaccagctgtggatgagtgctcccattactttgcgtccttgccaataggaactgtcacttgttttattgattttagccattctgactggtataaaatgaaatctcaaagcagttttgatgtgcatttctgttatgaacatatatatatttggttttttgagacgggggtctttatgtagctttggaacctgtcctagaactcgctctgtagaccaggctggcctggaactcggaactcacagagatccacctgtctctgcctcccaagtgctgggattaaaggtgtgtgccaccaacgcccagctgttgaacatttcaagtgtttctcagtcactgtgttttatctctagggaactctgtttagatttgtaccacatttttagttatttgttttctttgtatttgtttatttattttgtttgtctttgtttttgagacagggtttctctgtattgctttggagccttcttggcacacactctgtagaccaggctggcctcaactcacagatccacctgcctctgcctcctgagtgctgggattaaaggcatgtgccaccaatgcccggcttgatttttttttcgagttctttatgtattcaggttcagtgagtctggctttatgttgaagtccttgaccctcttggagttgtgttttgtgtaaggtgataagtatggatctgattgaatggtttctctttcctaatttagggtttgtggctgattggcctcgaagtcctccaggtagtccatgagcatggagtcctactggtgaaagacaataagaactttccaggtctttgttttaagctgccaaggtttttgtctcaggtcagtagggtaagaaagaagccagacttcttggaagtttaccacatttattacatagttgtgatgcctatccttatctaacgggaatctaatccatcactggtgcctgtggaggccagagcaggcatcagatcctccagaactagagttatagatggttttgagtatccatgtggatgctagtaaccaaatccaggttctctgtaaaaggagctcttacccaccatctttcctgcctctagctccaattgcttataaaggcattgctcttgcttctcaatacctccatatcaggtgtaggaaatgccaatgtgtacatctaaggcttgcttttttctggtcaagattttgatggaatccaggtttcctagtatgactggatgtgttgttcatcactagtatgcaaagctacagaaaagagaaggaggaaagggcattgccatgcaaaaccacacggaggccaatctccttcaggactattattagcacagacttcagatctgggcttttcctttaatagtcccttccctctgaactgacaccttgtcttctgtcaggtgtcagaaccatgtcaactctctctctctctctctctctctctctctttctctcccatataggaataagtataggtataagtatagatatagacatagatgatataggtgtaggcatatgtgtaggtatagatataaatggcatagatacagatacatagatctttctctctcagtccagtgtatccttggacaggctttgtagtcctagctggctttgaactcttgattctcctacctcagccttcttcatgctggaattacaggggatgtgccaccatacaagtcttaaaaatatcatctctaaacattctggatttgcctcattgatactttgtcttatggcctgttatttattgattagagttgagatttctttgttttcatcaatgtgatttctctactttatcatgatccctaatatcaggagttttcccctcattaaatcataccccactttggctgaacttgttagaagaataaaatgtatgcttcatctacacataaagctgtgatttcttagccagcctaagatttaaaaggcattttaaagtcacgtttatagtctccatttatcaacctcaaaaaagattaatttcagcattgtatttcatttagtcatctgccttctttaaaaatagcaatgaacaacactggaagacagctttccatgggtttgtttattggattatctttaatagcctcattttcttatttattgccggggctcaagtacagtgcaatcatcatgaattaacatgtgcaggcactgatggtatcataaataaagcagtgtggagaggacagctttgtcatattgtctcacaaggtaggttagcctaaaaggaaaggtatgtgtgtgcttggctgggagaacagaaaggagcttttttttttttttttccttctccatctgcttacaaacatgcactatacagacaccgactttccatgtgaaaggtcttttcctggcccctgagagggttaactttatggcaaaatgaaagattaccctccaccatctgtcactgaaactcagtctccatcccacatccaagtctctgagcagcgagaaagcaaaagaaattgatagacttaaaatgtgcccgggctgtttcatgaacaaatgtgtttcttctttgtcttcagaagaattttgagactggctggttaacaggcctctctgacagctgaaggaaagattagtgatcacagactggaggtacttgggaaaggaacgcattgtgtcgtggggcttgatgggaagggaacagagagaacaccaggtcctgaaatggaagctgattatggggagggagaaaactggagtcagggacttgcagagaaaacatttagtgtctatccagggaaggcaagaactcctatttaaagaagggagaagtagatatgtcagcttcctgctactataacaagtacctgagataatcaacttagaaagagaaaggttgattttagttcacagttttggagtagggcccttttcctccaggcataacatgctcaccccattgccatggtggagttgagttaccttggcttggtagctatggcaactaattgagtctagagggcagctatgtctacagtgctgacaatagagttgttgatattccttatagaatgacagacagaaagtcatgggatcctcatctggattattattattattccttcctgtaggtccccacctacaaatgatcttgggagatgttagtgtgtatgcaaagtggaaggttcactgagaggaggctctgacacggctatgaggctgtcatctgttttggagacacccatattcctctaactaattcgctgtgctctgtaaataagcacagattaattccttggtatccaaagttgagttttgatggaactgctcttttgtctgtcattggtacattatgtgggatgaatagatgtttgtttccatttctctgagaaaaggtagtacaagtggagatgtcaatacatggttggttagtgcattgctttggggccactggcgaggcagcccacccaagccggtgcatataagaaagaaagctactcccctcacggtggccaagaagtgataaatgaagagaaaaccaggatcactgtatcccagaataagccaatttgctcctactccacaccctaaaggtcacctagtggctctacatgcccaggaccaaatctcaagcatatgggcctttggagacatttaacattcaaactgccacaatgtggtattcttgccagagccagttgtgaaagacttctcacatctggggggggggctcagctgtaaggagagagagcatctgtgtgatatcatggcctttatagagaaacagattcaaaccctaaagtaaaatgtggttgctttaactccaataccatcacttaccagaagttcacttgagtggtgtgttttcaagggcaacaagtcacaggatttcagctgagacatggagctgtgggcatttctgtgtttcagtccacaggtgatttaggagaaagatgagttattggcatccctgggttgtgttcgacttcctcttcctccccatctgcctcagaattttgcgttcattttggaagcaaaggtgcagatatgcttagaacagatactggaattgtcaaaccagaactgagccgtgcttaaacttgaagtacaatgagatacctgttagtggctagtgaagggaaatagtggccatagtgacacctcagagaacagtaagtgctccaatgccctaagaggagcttccaaggagacaacttagtgagcacaacccgacttaaattctgtcaggtggaggaggaaacaaggctctgggagggagttctggaaccacagtaccatggaaccatggtactgtttgaagcatggctgtcacttcacttgtgaggaacatccagactccagactagtctgagtcacagaacttctttgggcaaatgcagagcagtttccttcagggaactatttacaaaatccagtttgaaaacattatttttattagcaaacaataacaaacgtttatgagatacaatgtaatatcttgacatatgtttattatagaatgcataaatcaaactaccaaagaaacattcattgcttaatcagcatgaaaaggaaaaataaggaccttgcctttcaaatgatcgtagctaaataatttataagagaacgaaaatgcttacagatgagaaaaaaattttagatttctagcaaaagtgtatcttggttgtgaactgaaatgtttctaattcaatcttccagagtttctacatgattccagacatggcgcaaaagccttcaaaagaatcccagggcccaccagcccctcagagcattactaattttcctctctactcccagctggcccccgatattcactgattctgctgagattactttccagcacacatttaacaagtattattaacactaaaactcaaataccttatcaatccatttaaatagaaaaagggtaatttgaatcacagattattttaaaagaaattgacttgatagcaaaaaatgaattttattacattaaaaacaaagattctgaaagagtaggaccctgaatgacctataatcagcaccagatcattcacactttttatatttttattttttatacttttgtaaaaaaaacttgctaagtattgccccagctagcgtatggcctttaacccttggcatactgttaccatgagtagcaaacacaactcctctcatcttagactccggaaagcacacagctttgcagaaggtctccggctgtgaagagatggaaaggggatagtcagtgggtacaaaggtgcagttagatccgaagaataactatggctgataataattaggtggatgtttcaagttgttgataaagaagatttttaatgccctccatatcaagaaatacatctgagagatttgccaattactctgatctgataattaaattcacactagattctctctctctctctctctctctctctatatatatatatatatatatatatatatatgtgtgtgtgtgtgtgtgtgtgtactgactttatgttagttagaaatatattatgaccagtatgtgtaacaccacaagtttagttcatagtaacacacatacatcatacatgttctttttaaaatgtggaagtttttttttttttctcagaaatctattgagatattttttggaggtaaagggcacaataaaacaagccattttaaaatgcatcagaccatgcaggcttgaattcacagttgtgttaatctgaagtccattccttgtcattttcataattcatgtccaaacgggcatcttcctagaggccggattcctctttggtcaatctgggtaggctgctgcgatctgtcagtgatgactccctttatacttctctctcacttcgagttcccccagctgtgtagcccacaaacttcctcctccagttgtcccaactggacctgtgtttgttaaatgcccagtcataaactctctcacttcattcagagcctgagtagacatgtacctactgctcttgaagccatactggagccatcaggacttttcctcctgaaaaatattgcatgaagtgacgacatcccttctacactttttgtatgtagcgataacctttaaaaataaaatagccaacagctcattaggacgggatgctatattgacttcattagctagtttcatagtgtgcaacacatagttgctttccccctcgaaagttaatagaagttctattgtttgaaagcagagcattttgcaggagagatggctcagaggttaagagcacttgttgctcttgcagaggacttgagttttcttaccattatccacatagcagctcacaactgcctctaactccagttccaggggatctggcaccttcttctggcctccacaggctccactatacatgtggtgcacatgaactcatgtaggcacacacacacataaataaatatttgtttaaaaccatagagtttatcatatggaagatatacattgttttcttgcgtccttagtatatttctgcaaaataatttttctctgaatcatcccaagtatgtaacaacattgaaaatgaacatcaatatttctgacgaccacacagaatgttttcatagttatcatggaactccggaaagaaagcttattttccttcatgaagtctgtcatatcaaagtaaaggaacacgttagtatagtttttatctgtgatcaatattgatgatcaaatgctcaactacagtttacctgaaacatttggattgtaggcaacacaactattctctctgcattctgttgtttcagttaaagcaagattccctgatcatacattttagtccgtgttaaattagctagttaaattggattgtcttccaaagagaaatgcctaggttctaatcgccagcatctgttaatgtgaccttatttagaaatggggattttgaaggtcatatttaagtatggtggctctgcaactaatgactgttgtcttaagaaagagatttggacacactgagacacataaccacacacccacaaacacatactacactacaaacacagccatgaagacagctgtagactgaaatgatacagctataagtctaggtgtttgagaattgcttcagagctgaggatgcaggttagtcacctgcctagtgtgcatgaaattctaggtcccatcttcagcacatggaaagaagggaaggagagagatgaaggaaggagggagtgagaggaaacagggaggcagagatggagagagaagggaggggagggagaattatttacaactgccaaaattagaatacagttatggaattgactttcccctggagcctccagaaggaagaaatactattggcatactgagtccagacctctagattccagaacaggggggaaataaatttcagataatctgtagttctatgaaacatgtatttttcacttaaagtgaatatagtcttttttttttgttgttttttggtgttttgagacagggtttctctgtgtagctttggaggctgtcctggaaccagctctgtagaccaggctggactcaaactcacagagatccacctgtctctgccttccaagtgctgggattaaaggcgtgcgccaccaacgccggtgagtctagcctttaagagatgtcatgtttagagtttgaggagatggctcagtaggtaaaatatttgctgcacaagtatgaggatctgagttcggatcccccagaagccacatgaaaagatgagtgtgtaagcatgtgtctacaaccccagcacagggaagcaaagacaggaaagttccaagttcaataaaacagactgactcaaaaaacaaggtggaagagcaattgaggaaaacatcccaatgtcaacctctggcctccacttgagcctgcatgggtacactcctgcacacatgtgcatacatgcatgcaccacacacacgctcccacacacacacacacacacacacacacacacacacacacacacacaatcaattgggagagagagagagagagagagagagagagagagagagagagagagagagagagaagaggatttttaggttctttgggcaaagtactgttaggcacagatgattccaggaagatgtaagattacaaattggttgaggtgaaagatatgtaaatagatttttttgtttcaatagtggaaaattcttggcttttagaatctccaacccaaaggaaaatgtatctaatttcaaagattctatttggattctcttcttaatattcctccaataatcaagctgctcattcaagttcaacagacacctatcgctgcaatctttgaatatagtaagtgtattcatataaatgacaaaggtaagaacacatctattcatttattttgaagttctaaaggaaatagcattgatattataatgtttgttaaaacctattgttttaaccaaaacaaaacaaaacaaaaaaaaaaaacaaaacaaaaaagctgggcggtggtggcccacgactttaatcccagcactcgggaggcagaggcaggaggatctctgtgagttcgagaccagcctggtctataacagctagttccaggacagcctccaaagccagagaaaccctgtctcgaaaaaccaaaaaaaaaaaaaaaaaaaaaaaaaaaaaacaacttttgttttagaatgttgctacaagctaaaaagtacacaacagtcaccagaaatcatttcatattgagaaaatgggaaaataaaaaaacacagtctagagcatgaataataaaaacccagacacagatattggggttcaagctgaagatcagggaagcaaagcagccagccactagagagttctcacctctatcaaagcttataaccgaaggagcgatccactgaacctaagattgcatttccagactgcactgctctccacctagcctcagaatcctaggctgcccggagttcctgtctcctccaccttatatttctctctccacccaaccatatcatccctgtctccacctccctagtgctgggattaaaggcatgagctctgtttcttttttcaaacagattcactctaatgtaaccctgggttgaactcacagagatcctgtctcctgagttttgggattaaagatgtgtgccactactgcccagcttccattgctaaatagtgtggctggctttgccttctgatccttcaggatatctttattaagtcaaaaatactatattaccacaacattcctcatggtgcagttttttttaattaattaattaatttatttatttattgccaaatagctgtattgaatttggatggtgtttccaactcagatagccactgtcttagtctgcttagcctttcaggacttggggtaactgactaatctgttcttattcttcatagttgtagtggctagaaagctccagtgtcttccccaatttctatccatagtatttttgacacagggtctctcagtgaagcttgatgaaacagctaatgggcttctcagcaagctgcagggcctcctccctgtatacatactgatcaaaccaactccctaggctgtctggaatttctgatataagggtactaggctttttcatgaggacttcacctttgagtaatcactctctaagggcagctgattgtcaggctgcttgggggggttgttctgttttgttacatctgctcaatgtgagacccctgatcattgtcaactgatattatagtgggattctgactgcatgagtatataattcatggctttcaaagaaatgccattattgtcctaactctgctaaagagatgaataaatgttggtttcaatttctaggcttttcctcatgaactagataaaatacatttcaagaatgtcattggctcagttttgttagtctaggcagaaaatgtcatattaagtttgtcatgtttaaataatgtatagtgtggtgcagttttctaagagaaaaagaaatgtcagatgagtaggcctagacttagtgagacagctggctatagatcattttggaaagcaaccaaggaagacacagcatggactctggcttcagtgcatgttcacacacatgacttgcatgcacacgggtatacacatacgtgcatatgtacacaacacccaaacatgcattgtgcccccaaaagagcaaactagttggatactattcagacatttatgttagctgtctcaaagctcagagctgtgtctcctccataggtcccctgttattatttctttcctggaggagaactctaacttggaaggtggtcattcagtctattttgtctatatgtgccattgtgtaaactggtcctaaagttccctgatttctgaaggaggaacttattgatccttccaaacagcatgctgagatctgcattttccccagaccttgtaactttgctgatcttgagctacagttgatgatatgttttcccatgcaggtcatctcatttaggtaagttttaagagtcctcacttccagggtttatgttgacagttatatctccttcccttctgcagaacaaggaccactctgtctactcaattatcagtgcagtagtttgactttgatgtatgctatactcctttctagttcggcatttctttacccactgaggtagctttgggccagagaagacagagtgcaactcatcacaaaaaagtatgtatgaatggggatggtattaaatagattcattttagtgggggagcacttgcctagtaagtgctagctagtctcagtaccaggtggtggtggtgggatgtaaaaggtttgagtctcagtgtctattttgataaataccgtgctgaacaccttgggtgttgtttcacttggctgagtttagaacactggttgtcttgtttaggtacactttgtattagggaaaaaaaggtattaaatagcttgccccagtctccttatacattacatctaagagaaagctggatctatggaatttcaaggtccttaatgttttccccctacatttctcaacgagacacacttccttaaacacttctgttatactaggtgggctccagggattggactcaggtggtcatttttgatggtggtcataccagttgagttatcttgatggtcccatatcttttgattatgtatttacagtcaattaaataggtgcttgctggtctgaaaatgactttgaataggaatgtgcagttggagatctagcagtggggtgctgggaactatctgacctccttgctcaagattctcactcaacttctaaataactcacatagtgcatcagaaaggtgaatctcttttcccggtgccccctttcctggatgtgggcatgtgtggcaatattggggggagtggctggacgctttatgtatcttcccttcaaggatggtaaataccaaggaatcgatgaacaagtaggtaagatgaatggttgtagtcactgatgctggagacttgttgttggacttcactgaactccaggaaatgatagatctaagtggttgcttttcagaaccacccaggctgaatgaagtctgagctacatattgagaaacattaaagtttcagatcaaaatgggtttggtcccatgtcaacattttgtgacgtgctttaatgtgttcctgtgtactcatgagaccatgcacatccaccgttaatgtctcatcatagggacaagatacctcaaaaacaaaatcaaaaacaatgtcaacaaaacagtttaaaggaagaaagattcgtttggctgacagttttagtctggggtcacttggcacttgtacttgtaccactgttctgtggtacagcagagcagtgcagtagagacggcatggcagagccgattttctggcttcatggttgccgggagataaaaagagatcaagggccagagagaagttcttcccttgatgacaccccagacctatttccttacttttggtcatttctatcacctcttaatctctctggctatgatgtgtcatttcattaattcttgatgatgtcagagctctcatgatccagtcagctttcagtgggtttcaggggcagatgtgatctattataaggtagaggaggggctggcttgcactctcttggattctggagagcatcggaagggcagagactgcatcttcaggagcaggagtgccgcagtggtaatttattcttatctgtgtaagttcttctctaataaacgtgtacttatcatttatcttgggtctggcaaactcatttaaatcctccgctttcaccccatttcctaacactgctgccactggggaccatatgtaagtgagtgagcctcaggactgtccaaattctcctctctttttattgtgtaagtgtcatttatgggaagatagtatatttcaaaacagtgtttctgatggctgcttggcaaaatcatatagggtagaaaaacaacaacaaaaatacagagtctccttttggtttgtttctgatacactgggaacgaaataagacccaagagtactcatgcatgcacgtgtggtttttaactttccagatgactctggtgatccaaggtttgagaatgtcttcattgaaatacttacgctatcttttcattcttcaacctgacttaaacaaaccttatcaagtctgtgtatggatcaaaggattagaagagcttaaagattgattcttaaagatatctctactgcaattgtttgggatgcaagttcaagtaggaattatacatcaagagaggagtgataatgataatgaaccactgggcttattaaactgagactgaacttctctatttcagccatggaaacagcagtgtagagtgaattggttttgttcatcataaaattcagctaggaatacaacaaaagatttggacttaaaaggttaaaacaaatgtataagttaacacatttgaaactcacattcttggcttggaaatattcaccaaacaaagtgagaccgataggtctgtgtttgagaggagtaacagaagaaagatattgagaaaatggcaaggcaagatgattatgacgatgaggagcagaaagctgctttttgagacagaatctggcttagaacatgtagaccatgcaggtttctaacttgtggcaatcctcctgcttttacctcctgcgtgctgtatgtcagacacgtgtcgctgtcttagctactgttgtattgctgtgaagaaacaccatgaccaaggcaacttataaaggaaggcatttaattgtggcttgctttatagactcagagagttagtccatgaccatcatggtggagagcatggtgacaggcagggaggcatgatgctggaagagtagcaacagtagctgagagcttacatcatatctgcaagatggagttaggagtaagactgggcctggtatggccacagctgactcccacgacacatctcctccaaggagacacttctaaatccttctcaaaccattctgctaattgggaaccaagaattcaaacatatgagcctatggggggtcattctcattcaccacaatgactaactaggtgagtgttgttactttttcctggagaaacaaatcaaattccaaccaccttgatgggcaccaccaaaaaactgaagtataatttcactgaagttcaacttggtgagaacaatgagtttattgtggtttcttacagagcataggtgaggggttactcacgggtgtgtgggtaatcctgcaaacagatgcatcaccacgaagtcccatctcatcatggatggcaaactcatggagcccttttacttcttcatgtggtctaacatctcccaagatcccgtgcatctggggagaagtaataacttgaatccaggggagggtctcctgactaccactatattgttctgctctagctgccatggctcccagagcatagaccaagcatctagttatggtcagatgaaaaaaaatcttccatcacagagagatgatgatgactttttgtttttgagacaagtctgattttataccccttggatggcctggaactcactacatacaccaggcagacctcaaactcatagaaatccatttgtctctgcctccccagtgctgaggttaaagatgtgcaccagcatgcctgaccaacgagagtgctatttttctgccttatcaatgcatgctcacctttaacctaccacccttcttgttgcctgacacaaagagaaaaggtactatagtcttctaatgtctttagaaaggaggcaaagttggtatccttggcttatgtgacactaattcccttttaaagtactcaagagtcttccccaaaaggccatttagatgcacaatcttccatacacagatctgttttgactaagaaatataccaaatatagaatacaattcatgtgagcaagaaacagataccaaatatagaatgtaatttcagtgacttatagactccagcataaaaacagaaggcaatgaagaaagcctagtggtgaaattccattttcagtccactgtgttgattttagttctgtgtagaagactgattcttacactccacctatcagaatcaggcctcttaggcacagaggttttcagctgtgttaacatgatgtgaaaggccaggtatggtgatgcgtgctgtaattccagcactggaacggctgaggctggaagacattgagtttgaagccagcctgagctacacagtaagacactgattttgtttgttttaaaggggtgtatgtgtgaagaaatggttcagtagttaagaacactttctgttcttccagaggatccaagtttggctcccagcacctatacaaaatggctcacaagacttgtaactccagctcataggacccagcaggctcttctggcctccgaggacccttgaacataccatatgatatacactcaacaaacacacacatatgaatgaaggtattcaggtgcaagagctaacttttccagagtcagactattctcagacaagagtctcactgtgtagccctgcctagcttggaactcacttattttgaccaagctggcctcaaactgacaagagatctgcctgcctttgtctcccaagtgctgggatactgatactactctggatatactggactaagtaaaatacacaaaatttaattttaccccttttatgcatttgtcaggaaatttaaaattacacaatactaaaaaataaaaagataaaaataaaagggtggtggtggcacatgcccttaattccagccatcaggagacagaggcaggcgaatctctgtgagtttgagaccagcttggtctaaagagctagttccaggacagcctccaaagccacagagaaaccctgactttgaaaaaagaaattaagctgggcattggtggcacacgcctttaatcccagcactcgggaggcagaggcaggcagatctccttgagttcaaggccagcctggtctccagagcgagtgccagaataggctccaaaggtacacagagaaaccctgtcttgaaaaaaaaaaattaaaataaaaaaaataaaatttctattgcagcacctgtatacagattttaaaatactgcacaaaccctctcagttaacagtattttgagtaaatttatgtatttatttatttatttatttatttatttattgttggtatacttgaatagagttctttcaagaactagcttccctaatacagaagatggccagaaattccagtttggtcagaaagtagtttaggctaactcagcacttaggcaccaatcagtgcatttgtttcctgctggatcttgggaattccgcccaatcatcctgctcctgatgttcttagtaactgtagctcatggctatttttatctccaggccagacaggaatggctgtgtatcaccatcccttccaagaaggatgaagcactgggtgctctagcctgaacgggacctgttttctaggtgagcaaattcccaccagctccagtatttgcttaaacacattgcatttgtggtgcacctaaaccagaccttgtttcatcacattaacctgttgctggtaggagttaaatacatactattcttaaaaccacagaaaaccactttaaagaaaactcacaaagtatgaggggaagatagagcccaatgaagggactaaacaaaacttactgttaatctttccatttcacaccctggttctagcattccaggaatacaataactgtcatcttaaatgttttttttcatataatgtttcttattggtataattctcttagtattgaattacatagctgttatgttttacacagaagagtcaccagttacatgtgggcttcctgctagttacaggtctcaatttatcaagtaacaaccgataaactactctaattcacaaaagccttactttattttaaaacctcaaacatacctatcaccccagtgcttaaaagctgtgcccaatatcacagagtagtttgaatttgcttcaaatggataccatctatcaacttttctcatttgatacaatccaggcagtaaaattggttgtgaccccagatattcaacaaaatctaatttttatgtcaattgagtaatcttggctaaaaatggcacctttaaaaatattttaacttatctctgtataatgtaaaatggaaatggctgaagactaacaagttggcatagtaaccattcttctaacaagtttttaccggagaatgactttacattaacctcaaagcttaatgttagaagccatttaacacaccatgtagatttattagctatatgttaggctcaagggagggcttccttgggaaattctttttctcagatgtatagacatagaaacaaacaaaaggtaggagttttgttagatatgacacaacagaaagcctcaagcattatttaggtgttaatgtaattttcatgtttgaatctatagtgatggggtgggacaagaaaacagaaacacagaacagaggccagtgaactttaacttgccatggattatacacacaagctgcttgagaaatttagacgaagtgtgtttgagctagtgtggaaacacacacagtttatgggctatttcttttatgaacagttcctgcccttgactgaactttgataatgtaaagatttcctattaacctttgagtaaattattaaattaacccctgaactgcctttgtacgtttcaccacttcagatgcacataccctcaaattccgagtgctggctagctacaatctaaaagtactgtggtgacaattgggggaaaaaattcatcaggaaaaaacattcaagagtatcagtttgcttaagagcaacctataatttacttcagcttgctattaatatctcttgtagtcaaatagcccacacctttaatctcaaaagttcaagaccaccctggtttacatggcaagttccaagataagagacctgcctcaaaaaaccaaaaaactcatgtgaagaatgcaaccctaactaaaagaaaagcaggactctgaaacttacaggttttgatgtgtgtgtgtgtgtgtgtgtgtgtgtgtgtgtgtggtgggggtttgtacatgcaggtcaaaggacaggtaggtctctgggtcctatggttcaaacccaggttgttaggcttggtagcagcacatgtggtgcctaaaaaagctagaatgtcccctgaagtgttaagagttgcaagcagttgagtcaccccatgtaggtgctggaaactgaactttcgtcctaaggaagcaagcacaagcaccactcttgttccctttccagccctcaggtacaaaatcttattaactgacactaacactctccatggttatgatttaatactatggacaatatccacttttcaaagttaggaactttaatgtagacatgttcaaaacgaatctaactcagaagaatgacgccaaccacttaaacgactatcagtgttagagattttaagttaggcattccagcacttggaatgctcaggcaggagtttgagatcagcctgggctacaaggtgatttacagctggcagtcagtctcaaaatcaaccaaccagccaagcacagtggcacaatcttgcaatacaaaaactggcaagattaccataaatccaaggcttgcctgaggtacaaagcaggatcatttcaaaatcaaaaagaaatctacacatcttagcttttcttagttttatgcaaccaaattcatttttaattcaagctctaaatatcacccttaaaaattaaatagtaaatatctaagtacttaattgtaaaattcattactgctttactgacattccggaattacgtgttactactttaataaatgaagaggggtagtgtggccttaaaccaacgatagccccaatactaaatccttaggcacaaacaaaacctttcctttgtaaccatccactggattagaagccctagctttgagaagttccactacattacatgaaaagatttgcccatttatgggactaacacagaaccgagttccaaggtacactaatagctaaatttaatgtagaatgagacataccacatcaagtgtctaggaagccaatcttcctaggtgccttacagactgaaattattctttacaaatgtaaataataaattatttacaaatgtaaatccaaatcttaaggtccccatgcctctcaacagggaccttaagacttggctatatacacacatataaatatatggacacatatggatcacacacacacatatatatggagacccgtgcatgcacgcatagccaagcactcacattcctttaaccccatcaccctggaggttaaggtaagattacaagtaacagatttacctgggctgcacagtgagttccagacctgagctagggttgagaccctaatataccactctaccccaagatgtgattatggaatcattgcaatgtcttgctaccaaagactccacacattgactggggatcgagggtacaccatctcatttaagtttaaactcccaaacagcactcagaaatgtacttactttaacatgcatgagacctttggttcagtccccagaaaaaaggtaaaggatcagacttttgttgatatttgttaaggagacaaagtcattttaaaatgaacaagtttcccattaaaatgctgtatttttaattcaacaccctaccgattaagggagatactattgctcaatacatggacttcttcataacatttgcacttgatgcaacagtagtattcatcaagaacagatggaagtgaaccagattatttccacttctaaagtcctccccgaaaaccaagggctttattcttgattgcagttggcctggcatttactgttgttccttattatttaagcataacaactgcatactcagtctaaagtgcttgctttcctctctacatcagaaccaaacccatacagaaatagctttctgcaacagtattcttatgtcaccagaaaaaacacaaaagaaaaaatacattatgtgcaattgtttaaatttcattcctttctcaaattttaggacctgcgctcttcaaaatttgccttaaatgtgtcacacctgaggaagtttcatgaccagctcatggtactcatgagactgagttcaagaatgatcatgaaaaataaatttgtaatatagacaattataaagttgaatatgaaaatctccctattttccctgttttagagtctaaggcttaaaaacccaatgaacaagaactttccctctgtacactgcttttattatttacataatacaatatagcatcaatgctgaatagcatgattatgtgcaatacataaatatgaactatctgtacacatctgcaaatctaactcagaactaaagtacataaaatcgaagcaaaactgaatgttttataatgaaaaactaggactgaacactgcaataaatcagaagtagtgccttgtgtacatacttaactatttacagatgataacaggcattaccacaacactaatctaactatactcatttatatataaaaaacacaagtttcatacatcacaaaaaaccttccattataacacagaagtgatattaccagacaagcatcagtgaagtatactgccttttctagttgttattgtacaatgctgtagataatgcagcccatgcaatacacccaagaacactagagtcctacacccaaatacaatatgataaagcagccctctgcaagtggtgctggataccactaaagaagtctactgcagccatgttggttatgattttccatgcagaagggtacagttacattaaaaactgaagtctttaaaaagctttaaacattctttcttgaaccaaaacattcaacaaaagatgcacatgaaaaattaactgttcagatacctttgcaacttaaaattcagatgcatgttatttaacagagctgctgtatgtgaaaaccaaacagagtttaatttcttcttgtaaacaaatcctagtgcagttctgtgctataattttagtagagaatgcagatatcttctggtgcaggccagcacaataagcttcaaagattatctcaggcaccctgttgttgacttgatggttttacttataaccagctgtgacgttacctttcgaagaatgtcctaattgacagcttttagaagaccaatttaaccaggcttacacatggcaccaaaatactggttttgtagctttcttcctgcttccaaaagtcatgttgaaattaaggtgaagtttgactatggtagtagactgccagtccttttctggtgtaccatttttttttttttttaaagtacaggcacataacactagccaaagattataccttgattacattcccaaaaggcagatatgctgcaaacatgcagagatttcattcatttaatttggcacgtggaactaaattttgttcctattatctgtgttatttcaatttgttgtgcagatttttgtccaattttattgaggggagggcatatacatttgtagggctgtatctatccaattctgcctgtaacaaacacccaaacatcctaaaatatcaattatacgacagacaaatataaagcaaaactctggagaacatcaaaggaaaatggccatgcatctgctctttaatgttttcctacgatatattaaaataaaaacaaagtttcagtctcttcacatgtagtaattttatattctctggatcttttcagccacaacaactggattctcttttctgatttttgctgcagcttctgctttgtaatcatatggacagttgtgcttgtcagagtaacggtgaagtccacaaaacaaatttccacatcggcagtcaaaccctgcacaaacaagaggaatcacttggcaacttgtagcaattaggaaaacaagcaccctattcactagagaaaaggaacagattttcattgctttgattatgaaagactgtcaactcctgacaacggggtaggattcatacaagttctagaatgaggatgacttgaattcaagtcttaccacaccacataagagctgagtatctcaaacgaaaactatacaaccaactacaaaaattctgttgtaaaaaaaccacctagaccatttcatgcttggccccaaataggtgttcactaatgttagttcagctaacttttctctgtacacatcaaaaggaataaaaaaggacagatttctatcttttcaaataaagaaaaacaattcacaaggcctgaggttaatgataattacatgactaggccaacattacaattggaaagtaaatccaccgtctcaacccaccagcccaccctttctggaaatgttagaatctgcttttttctttcttttttaatgtgtaaaaccaatagttccatttggagtgatgcttttacgatataaattgttttgtggtaatacctgtaaggccaactttctttctacacataaaacatctgttcttctttggtttgggcagctcaggagctttttcttcactttgagaagcactgggttgagaaactgatggactcggctgagtgacaactgaaagacaaggttataaattagaaatctatctggaaacccctcgctaacaattatctaagtttaaaagaatatatttaagagaaacagctaagattcagaatgtatatttaaattgcctgtaagtttttatatttcctgccaattgttatactagtatatacttctagtaagtgaccagttaagagatttcttcaaacaaaacaaatattatcaaacacaatggagattcttttgaattattaattttagaaaggcagaccaggatttgtttttgttgttttgacacacggcctgacactgtactcaggctgcccgtgaacttgaggccaccattttgtttaatcccgtgggtggtggggattacaggtttacaaccaaactgaccttcagactggtgctttttttttatataaagtcacaactctcattttcactgagactgactaactggtatataaaaaggccctaccctctattaatccttttgttaatttctataaaggtttgtcacaaataaaaaattgccccaatccctagtttttcatattaccaaaaaaacttgctaacacttatattaaacctaactgtatatgcttataaacctaattgcttatatttatattaaacctaactgtacactataaaggatttacagtgcaatccaaacaagaatagcaaatcaattcatacactgctaaaaccactgcccaaacaatataccaattccaatgcttagtatgactaagtttctaggacaagcagattgctttaatgtaaactgatctctcaatccacattagcaaacacatacactgggatcaacagcctagtagcagaacaacagaaaatactccacatactttttcctaagcaaccgtgataaccttattattttcctaatgctattggagtaggtagttggaaataggagtgttaagccatttctttgcccacacctaaaacattaataaactcgccagacatacaagggaagggaatagaaaagaaaaaacaatgagtcatagatttctatcaagtaataataaatgtgattattagctacagatctacttccatgtaatttgtgtgtgtgtaaaaccagcatttggtcagttttttcaatgtaggactcatttcaaatacagatttgcctgccatttcaggaccaaataatatgacttcatgaaattgattcagcacaggggggaaccccccccccaaaaaaaaccaaaactttcttagaagacttagaaaaagtcttcaagacagactgcaattccctgccatttccctcacaatcatttcacacttcattgtttacccaaaacaagctgagtaaatcatatgcacacagaaaatactaacacaaattagtgttcttataacattgaattttctggttgtgctacaaaaatagctccaaagctattacccattgaaaacaaaaacctttccatactaaaagtctcactcacaacacaagtaatagggatcccacttttacaactcccagtactcagtatgtgctttttgtgttactgtttcctacaataccaacagagttgggactaaattccccatggccatgacaatttaagtcattgagttcttaccatatagtttccagactacttgattgattttagaaatgagggtaatgaggggatgagtagaagagggtaaaaatactagctatttatattttttggtactacatatttgcttggcctgtaaattatagctcttctctttgattcttcaacaaaaggagagaatcccatcaccaactcaattctttctcatacctcgaaattcagaactgaactagtattaaacttaaaaagcatacctggctctgacacctctgttttcggggtagttattttgtcctctcttgaaatgctcatttctgtcatttgttgagttacaggcaaggcagccacaggcacatttctatttgagttcaagcaaacaattatttttaaagatgttaagggtattatttttttgagataagttgtcaattcaactttaaattatgtgttatttccaacatgatcaaatggcaccagattaatttaaaaatttggaaaagatattggatgcccaacattaattagtaaaaagaaagtaatttgataaatggctcatcaactcatggctgcatatttctatatatagcatcacattatagttctagaaagtgttttaactgtgcctataatttaaggacaaaggagcagctgtgtagaaacaccttgtgaggcactataatacagtcaacagagtcttattctttacaatccctaatcctcaattacaaagaaataaaaacacaacatttttaacagtggccttgaggggttcatggagtatgttgtgatagacaactttattcactgatccaagagccagatattaatggaatctattagtctacaatgtaggcaaaaccaaggccacctgataaaaccacactgattattatatgaatagcacaaacatcttgactttctattagagactctgaaatgttcactcttaccttgatttttcagacgtgctgccagcagcaccttcacagttgtttaaactagcatccgctctctgtacagatgcagaatctgaggtaggactgttggaaccactagctgtccctatttaaaaaagggggatttgtaagaaaccaatcagcactagaaaaacccacttagtaaagacttagtaagtatcaatacttgcatttaatttagtgttctaagcaccttcactgcattgcaatcctacacttgacattcagacaaaaaaaaaaaaaagtcatatcccaaagaacacatgtatgaaagcttcaaaaaggaaaactaaaaatattacaagacgtttgcagaatagtcctgaggttgtctcggcaagcacttgggctgttgtcttaatgttaagctcttgtcaggcattctctccttgagttttcgatagtctcttgattcttaggttttctctccaccaggttcaaggttttttgtcctctccccacccccttgccccccaaacaacttacccattgggctcattctgccactattctgttgtctctgaagatgttctttgtagcaaacagaacacattccatttgtcctaggattcccataaaagccacatcctgtactacatagcatgggccctggggtctggttagtttcctgagccatatttctctgctataaacaaaacagaattttagaaattagcatgtcagaaaaacattgtatacaatacaatcatcactacacctctgttatttctaaataccaaatctgttactaacaaaaaccaagattgtgttaaacagaaatgagtacatcttactgactttaaaaaacagattgtgaaagaactgttcaaggaccaaaaagaaattacaccattaaataataaagtgtatgatttcatctgttactattgaattttagtttctgaagatggcagcttgccatttatcagggttgtttgaatcaattttgaaaactgtcacttttacaagtcagccatttcaaatgatgtttacttcaatagggtaaatgcataaacagggagaaaaaaagtcaccccacagtaatccaactaatcactacctcttgatatttgttagatcaagttggctgaatcctggatttagccttgaagcttttaaataaagatgtgtatacgtgtttgcctgtatgcatgtacacatatatccctgatgcctacacactcaactccctgcaactgaagttaacacacagctgtgagccaccactatgtgggtgctgggaactgaatccaggtcctcttataagagcatcaagcactcttaatgactgagccatccctacagaccatcttcagctttcttaaaaccacccccagaacctgtctgaaagacacacttgggccctatcagtaatacttccactcagtgtctagaaacctgtaaagcagaaactaccagccacagacttttcagtctctatttagctttaacaagtatttttctcctgtcaaaaaccaaaacctttccaaatccaaacttgattatgtaagcaatataaaaacatactctgatcacagttaatatttaatgttaggctaccagaaagaactttacatagcaagcatacctgagtatttccaaaagtttaattggcataaaataggctaactttacttagcttcccactgtgtaagagaaaatataagtaggaaaaattacttttgaaagaattatgtaaaaagcattatttgagagcatttggttttaaggaaaatgtggtcactttttttcccatctactacacagtaagacacaccctattaactctttaccaaaattacaaaaatgaagaaaggggaataagcaatttgatcaggacaaaaccctgaccatgagtatccagtcttgaccagttaaatgagagcaatctttccttgttatcacaagatcactttgagcaaatcaagcttgtatattgtgattaaaagccatagttcagaagaatagtagtaatttagttgacactgcctctttaaacagtgagaggaatttagctgactcatttcagagcaaggcagcgtaaatatttcaagattacttatgcagtttaataaacacttttagttgactttttttaaatgttgagtgtaacacaagcacagaaaaacgattcaaataataaattatgtatcttcattttcttcatgcagtgtgctgacctttaccctatgcaaaaagttgggcctttttcagcccacttaagaactatgctacaactaagttactactataacttccagtgacacctggcattctttaaaagtatactgagggaattaagaccaactgatcagatcaaccctgttttttaatcagaaagcacttttcttctgtgaatgagaagatacccacttagacaaggattccaccttcagaaaacacaactcaaattcttaaacttaagtacacagaaagaacaagaaccaaaaagacaccagtcttctataagtctccccctcccctagtaagtcagattttaaatgccatcacatgtgcacagcttgctttaatatttctcagaagcctagatcacatgggagggcgcttcagcctgtcacaaggctgcaatgtgacaagctgagctggatggaggctctcacataaagcctagtcaacaggggcctctgaaatcagcttctatttatatctcagagcctgccaactcctacacaaccccaagaactaacgatgcagtattcatatatctcacataacaaaacaaaatgcaattagggcctccaggttttttaatgcaggatcaaagaacaacctcaccttcaatccacaatacccaagtagaattaataacaaagtaagatgtgcttattgaaaaggggtaggaggggagtaagcaggcacagtggagaaagcatggcagcataaatactccatacacttaatgaaaactatagtgtgtttgttaatttgtatactgtatttcccttctattttgggaacaaaaaacaagttgttagagacttagtattcttccataagcccttcaggcatagctgcaattgttttttgttttgaagttcacggcatttcttacctcatcgattaaaacgaacctcacaggattaaccaattttccaattaaaaaactgaaatgaatgagcttttcttttaaactacgggctacctattcaaggtgaacatgcctaaaaatggcaagaccactcactaacctcgagggcagacccgaattctaggttctaatgggccaataagcctgaccttgggcaagtccttagtctccaggtcccggttacctcagccaaacagattttttttttttgaagctcctttcctgatttaatacctgtcctaggcacaaaagaaaaaaaaaaggtacaactaaaacaaatgcctcattttgggctggacacttttaagaacaaacgtgaaaggtaaaaatgaaatattttcaccaattaaggttatgagatctcacttttaaaggaatcatcaaaatgggaagataaaaccttcctatttcctgtagttaccgaacgccaaatctgagaaacgatgctctgacctatatattattttctcctaaatatccgggtagtattctcaggcagctccaatggacatttaacttctaacaccttccccaaaatagagctccacggagtgcacggaaaaggagcaaaatgttaatgtgcgtgtagacaaagggagaggcgctcgatttgcctccatgaaggggctctggagggagcagcttaaccacaattggaaaaactaaacaccttccggggagacagccgtggggccgggtcccagcgatttcgaccgagttcggtgcccagaggcccccatccccctcgcagcgcagggcaggccgcgctccgggaagcccggcagggcctgctccaaaaagcactgagtcatgcactcggcaccccacagtaatccaactaatcactacctcttgatatttgttagatcaagttggctgaatcctggatttagccttgaagcttttaaataaagatgtgtatacgtgtttgcctgtatgcatgtacacatatatccctgatgcctacacactcaactccctgcaactgaagttaacacacagctgtgagccaccactatgtgggtgctgggaactgaatccaggtcctcttataagagcatcaagcactcttaatgactgagccatccctacagaccatcttcagctttcttaaaaccacccccagaacctgtctgaaagacacacttgggccctatcagtaatacttccactcagtgtctagaaacctgtaaagcagaaactaccagccacagacttttcagtctctatttagctttaacaagtatttttctcctgtcaaaaaccaaaacctttccaaatccaaacttgattatgtaagcaatataaaaacatactctgatcacagttaatatttaatgttaggctaccagaaagaactttacatagcaagcatacctgagtatttccaaaagtttaattggcataaaataggctaactttacttagcttcccactgtgtaagagaaaatataagtaggaaaaattacttttgaaagaattatgtaaaaagcattatttgagagcatttggttttaaggaaaatgtggtcactttttttcccatctactacacagtaagacacaccctattaactctttaccaaaattacaaaaatgaagaaaggggaataagcaatttgatcaggacaaaaccctgaccatgagtatccagtcttgaccagttaaatgagagcaatctttccttgttatcacaagatcactttgagcaaatcaagcttgtatattgtgattaaaagccatagttcagaagaagcccggagagccgggacaagactgcagaaatggagcgaggtgacaaacaagccggaccccgggcaagggcaaggtgctgacacctgcccagagcacgaacacaaacccttctcgcctcttcacggtttcctctgggaacagatgtagtgtccaccgatctaaagaaaacatacgtaaatagttagggctaccttagccacaactggaatgcagttagggcccttcatctccgacattgaagagtcccaggcctttcccctaggtaccattagagttggccttggcgggagcacaggaaccttatttacttctggtgtttttgatatcatgggagtagtgtgggggagggatgctggtgtccggatgctccaaattaaatagctctgagtactgcaggtggagtacctgggacataaagtgttttaaaaaaacctatttcgggccgggcgttggtggcgcatgcctttaatcccagcactcgggaggcagaggcaggcggatcgctgagagttcgaggccagcctgcctggtctccagagcgagtgccaggataggctccaaagctacagagaaaccctgtctcgaaaaagaaaaacaaaacaaaacaacaacaacaacaaaaaaaccctattccggggttacattgctatgattaagtaatgtatttgaaatttagtctgggtcattggttctatccctttaggattttacctccacaaactagtaaataataaaaataccatgtagcaaccgttttcagtgtcacgaatttttcatttagggtctccttaatttatcacagtaatttcctgagaaaaatgtcctgtctatttgtcagggtgaggtggtcatgataaaggatgcttgcctggagcactacagggtggaaaggctaatggaagccatatttactgagaataaaaataagagaattttttaaaaagaggataacttactgtctccctttactctcccgtttcaaaaacaagttttacaagattcttatcttgtccaatttaaacaacaaaatcattttagaatcaagttgttgatgcctacacatccgctgaaagcctaatcaataatcgacttagactttctgtcttcaaaatcgagtcttctattttgtttatagtgagtcatttttgagttaaggattgcttaatgattaaaaaaagcaaaatcagcccggtgttggtggggcacgcctttaatcccagcactcgggatgcagaggtaggtggatctctgtgagttcaaggccagcctagagcgagttccagcacagcctccaaatccacagagaaaccctgtctcgaaaaaagaaaaaaagaaaaaagaaaagcaaaaccggccaatattataatttaaaattgcaagtaatacaaaatctgataattgaagtaagacctgtgtattgtctgtgtgtacttatgcttttagggtgttcatatggtgatactgacatataagtgaacagccagataaattcaaattgcttgcagtgtaactaactagaattttaagggaaaaaagtctcagctctagtggtctagaaactccactatctgttttgatatgccagttagagacagagttgtcttttgtttgtgttgagacagagtctcctggtgaccccgactggcctggaacttgctgcatagaccaggttggccttgagttcatagagatctgcctctgcctttgcttaatactggtaccaaagcaggccacaccagagtatgttaaggaatggaatttcacagatacagattgagagagagattagagattgaataggtatggccctgttgggaaaataagtagatccagtaaccccaactcagtctttggggaaaaacaaaatgaaaaacaaaagcataagttctaagccaggcatagcagcacacacctttgatctaacaagacagaggcaggtggatctctgtgaattccaggctaagatgggctatgtagtgagttccaggacagctagttctacatagtgaggttttctctcaaataaataaataaataaataaataaataaataaataaatgctggtttaagaaggctgggcatggtggtgcaccctttaattccagtgtttaggaggctgaggcaggtggatttctgagtttgaggtcaacctggtttacagactgagttccaggactaccaggactataaaaagaaacactgtctcatcctcccacccccacccccctatcagcccccaaagcaaagtaagttattggtctaccttagaatatagggacctgggttattttcatctttatacaatgtattagggttctctagatgagcagaacttatagatatatatgggatttattagaatcacttacaggctatggtccaactaatccaaccatggaggtctgtgaacggaaagtccaagaatagagaaattgcacagtccacaaggctggatgtctcagctggtcttcagtagaaactggagtaccaaagaagtacgctctaatgccagggaaggaatggactatttagcaaggcaagagtgagcaggcaaagagcaaaagctcttccttcttctgtgtctttataagaggcttccagcagaaggtgttgcaatcattaaaagcgcatcttccagcctcaagattcagatttaagatgtgtgtttcttcctgcctcaaagttctggactagaaggggattcacccacttcaaaccaagccaaaaaaaaaaaaaatctctcacaggtgtgccctccatttctggattgtagttcaacccagatatagttgacaaccaagaatagccatcacatacgatacagatagaatagcttctggcattactaagtgatcctgccatggagagatcttctttttctctctgtgctttgggaaaactcggggaaaatcaaggcctttgctgggttttgaaatcttttgggtgtgatttgacatttgcatcatgttcctttatttccagtccttcccacacttcaaagattagggcaaaccaactcagtatctaaaagtcatttttgaaattgccaactaaaaagatcatggagttacatttagggaagatcagttaaaacacaatgtaacagctctttacaatgtttgcctctgtaataattaatggctacgataagttaacgggctagggagatagcttagcagtcacagtgcctgaagacctgagtttgatccctgtgggtagaagcagagaactgactcctacaaattgtcctctgaccttcacatgcacttgacatgcacatggattgtatttgttctcagctaactgaggggctggctgattttttccccccaagaaagtaaaaaagcacatatcagttattatgtagatgtgataatttgtatattttttagttttacatgtatgaatatttttcctgcaatatgtctgtgcaccatgttcatgcctggtgcctaccaaaaatcagaagagggtatcacatctgtccagtgaaactggagttacagatggttgtgaatcactaagggtgctgagaaccaaacttagatcttctgtaagaacagcagatgttctcaactgctgaaccatcctattcctcctgccctgaccctgtgaaaatttaaatgtcataggtactttcactaaaacaacttcattgaagaatctttaaagccttttaccccatgcaagactttctgacacaattaagatatactcaatatagaaataaatgatttttcagactaaaaggccaaaagtctttattacttgtataaaccaagaattgaatttaaaggaaatggatggcttaatatatatacatgtaatttgccaggttatcaacctttaagaaaaaagattatttggtcttaagaactctaagagatgtttgtgactgaacaagtcagatgtaagctgttaagtttgtttctaatgccagcagttagctgagaattatccagaaactacctgggatcatgagtggagtcagccagtacaatagtcaaagaccagactggtgactcaggtccagcacctaagatgatacaaagcttgcccaatgagtaattgtcctatggccctgctatcatacaacaggaaagaattacagaaagtagacagacacccataggaaggaaaggattccagcaaaggagaagaacacagaatagggtaggcctgtgttctagagaatgcaaattctaggcaaagagccatgggttgacattttaagtttgtgcaatgatttaccacttgagtatttattaacatccattatgttgataaaattctttttttttctttttttttttttttttttttttttttggtttttcgagacagggtttctctgtaggttttggagactgtccttgaattctctttgaagaccaggctggccttgaactcacagagatcctcctgcctctgcctcccaagtgctgggattaaaggtgtgtacaaccaccgctgggccgatgatagatgataaaattcttacaacccaagtgttatctttctttgtgtgagggagactgaagctgagcatgaagtatgcatcttgattgttaggtgtctagtgagactctggccttgtgtcccctggttcagagttgtgtcactgggaggatttttcttttacttattggctgtattcttattttggtgtcaagcatccttgccaagtacattgcttcctgcatacatacaactatgacttaaccttcaacagtccttaacagactgtctctacatctctatccagtctctgaatgctgctattccacacatggtcatcacatttcaattttgttcaaaatgatttatgtattatttggcaaatgaaagttactttggtagccaggcgttggtggcacacgcctttaatcccagcactcgggaggcagaggcaggtggatctctgtgagttcgaggccagcctggtctccagagtgagtgccaggataggctccaaagctccacagagaaaccctgtctcaaaaaaccaataaaaaaaaaaagaaagaaaaaaccctcaaactttatggagagattctattgctgaaaaccacctcatactggactcacagaccatggagaaatcaggaagtttcatccttactaactatcgttcacagtgctggaagttgatatccatgtgtgaagcctgcaaggtatataatgactgttcaaacaagatagtccgtctggtgcaatattggcatgaatgttatggttgccaccaactactttctacttgctctattagatagtatcattcctagtattgttaatgggacaaaaactaatggctagataggtcataggccctagaggaaaaaatactgttattgtaagggggccttggggtcagcacagaacacaagcagacaccaaattctaagcacaaaggcaatttattagcccagagggacaagggggcaggggctccctctggattgggcaaagacagtcagtgtttctgcaagagtggatttttaaggagaaaggggggggggagtctgtattagcatgaattggtaagtcctgattggacgtgttagccagtgtagccaaatagtgatttttgattgctggactttggtgttttgaacaccttcgtgttcagtttcagggatgagtcaggtataaggaagtggccaaatatggtaatagaccttggtggctagctttaggaatgtaacctaacagtttagcaagggagagggaagggtgtgagcaagacctgctggtgcaatgtttgccatgcttgggtctgctagacagcccttcagttattcttctactaaatgggaataatattaaaaggacttctagtgacttatttctatacccatttcaggactcattggagaaactgcaacttgcagtgaatgggtagtaacacagaggtactcaactggtcaacatgcagataatatgagaccggtctgctgtaaaaggtatatacatacaaatcacaccctcagggaagattgtaagagccagaggtggaggatgacttcaaggaaatgttttcccaacacaatagggaagttgcacatatgaatttacagtgattgtgacagcacacataagactatggaagctcaagtcagacaaaaatcacagtatggagtgggagaggggacactaaatcccaccactagctgaggagttactgacatttgacagttgctgggagaggaagagtgaggtttctttaaagatgtgacctctggtaggtcagtcacactccaggtcaggccctactccactcctaagagtagctgggcgacatacactggactcaatgcaggggtgcaggggtggggctggggagttagggttacaggaaggggagtgggagaagaaaactcaaaagttgattagatagatagggaggtgagactgtagagggttgatgtgaatcccactgatcaagaataagactactaccacattttaaagtcaaatttgaatgaagcaagctttaattacatactgtccaggacgatgggctctgcccaggtccatctctggctcctcagaaaatgaccctgaatcaagtttcgcaagggctcaggaagaaaaaaacccacaattcattgcatcaggtccaatcaggggcaagcatacatcctgatgtatttcctgtctatgaacctgttgcttacatatgctcaagcacatccagtacagcagggccaaacttttgtggaggaaggaaaatcacgtggcttgttgtcttccataagcaatagccttcagcatttcaggaactagctgtctttgggtaagggacttgcagatcagaggcatttttgtttcatggatctcttaggcacagtaagtgaaacttaaaatgtagctttggccctcacagatctgggaggtgtttgggtggtatatatgataaaaatacgttgcatgaaattctcaaagaattaataaaactattacttcaaaaaagtttaaaaaatcatacttttaaacctatgccccccccttttctcccttcctttctccccttttcaacagttgtaaagtgagagggaatcaagcacagggcaggcaagtcttcgtcatttctccctatcatagtctaagaactgaagtacatgttgtccagactccattgtcagtagtttgtgcaaattattttgattctcataggagaattgagacagaagcataattgctaatcccattttgatgatgtagaaattgccagcggctattatgcacttgatagaaaagtaagcatactgtaccacagtgcacatcaaaggactggaccatgaggccttgctccttcgctggttttgttgttgttgttgtttgttttgtctttttgagacagagtttcgtgtgtagtcttggctgtcctggaactagctctgtaaagcaggctggcctcaaactcaaaggtctgcctgcctctgcctccctagtgctgcgattaaaggcgtgtaccaccactgtctgaccatgcttggtttttttttgttgtttgtttgtttttgttttttgttttttcgagacagggtttctctgtggctttgttggctgtcctggaactaactcttgtatacaaggctggtctggaactcagagagatccgcttgcctctgcctcccgagtgctggaattaaaggcatgcgccaccaacgcccagccactatgcttgtttttatgttgtttgttttccttttcttttgagacagggtctcttcatggagtcccagctgtcccagcctccttcactgttaagaggaggcagagcagtgctgtccaggccctgatatccatagctgtggtgatagttaatattaactgtcaatttgatagaatctataatcaccaaggagatacacttctgacacttctgtgagagactttttagactggatttaaagaagtaggaagactcaccctgaatgcagatagtaaagaggaacctgcctgactccattttaaaggcaggagctactatgctgtgttgttaaaactgagtttctatttactctaagatctgaattgctctctgtttcctggaacctgaccttgcccaacccacgaccttgacttatttttgagaatacccttaccctctctgactctccctggcccttcctaaaccctccctaatcacatggtgacaacatgatgctttttggtttttttttttttttccctgtgtttgctccttactgcctcattgtctctcttctgtaaaactcctcatgatgttaccccttaaaggggcccaagaaatggattccggactgctctaacccaatttaggaggcagttgctggccagctcttggggtacaccccaattaaaaaaaaattaagcttacttcaaatttggcttgagattaacagtaaaggctaaggtcacagacatgaatacaaaaagcaaagtaagatgaatacaaacaatcccccctcccctccagtccatggctgcagatacacgatgaccaactgcttcaagctcctgccaccacaatgttctaccgagacaaaccatgagccaaaataaaccaaagaaacctcctgtcagtttcttctgtcaggaattttgttgtaccagtgagtaacataactcataaagctgccagctaagaactgttccatgggctgcttgtagtggtatgacctttaatctgagcactcaggaggcagaggcagaggcaagcagatctctgtgatctcaaggccattctagccagtgagttccaagctagtcaagacaacatagtaagaatttgttaaataaaacaaaaagccagccagtggtggctcacacctttagtcccagcactaggaaggccgaaaaaggcagacccttgagtttgaggccagcctgatttacagtcaagttccaggacagccaaggctacacaaagaaaccttgtctctaattaaagatggccatgctagtaagtagttagctccctgcttctcaggatgctgtggtctagatctaatgtattcccacaaggatcttacagcaaagtcttgagtgtccccctgttcataggtggtagacacacacgctggaggtgtagcctcatggaaggaagttagttcactggggtgtgccattgaagaggcaactggcactgcagattttctctctccctctctctccttccctccacttctctctacttctcagccatcaagaaatgaacactgataatgaaacagcttggaatgttagcttcaactgaaacaaggaaacactggcctgcctttgtccagaatagatttagtaaatgcccagtgtttccttgtttcagttgagggtaacattccaagctgcttcattatcagtgttcgaactaagtgtgtagtgtgtgtgtgtgtgtgtgtgtgtgtgtgtgtgtgtgtgtgtgtgagagagagagagagagagagagagagagagagagagagagagagagagggagggagagagagaatgacagagagagatctggaattaaccaaatgttaccaaagacaaaatatccttaaaagataattatgccaggtttgatggcacctggctctaatctcagcactcaggagattgaacctaggttataaactcaatgccacatctagagctagatgggataacgcaccccccacacacaccatacacacacacacacacacacacacacacacacacacacacacagtttacaaaacaaaggctgattttttctttaattgtacaaacatcttgatgtgcttagaaaatagtgaaaagaatacaacttgatcataaattataaagaggaccaggaaaaccatgattcacccaagagggaatgatgggacccagattgtcctttaaaagtaaatgcaagatacagaactgtttactaagatgttttgaagacaagcgaaaaaaaactgtgtgaaactggctccaatctggatatgggagctcacgcctgtaatcctatcacttgggagtctgagacaggaggattgccatgaagaaaaggtcagccttggctatataataagtttcacgtctgagtgtgagacaaatatttcaaaataagtaaataagaaaatttgatttaaaaagaaagaaaaaggggaagaagctggcttcacttaaactctgatgctaagaaatggcttcctctacacacacacacacacacacacacacacacacacacacacacacacacacacgaaagagcaaatcagttttcactctgtaataccaacgtagcgcaggttgttttatctagaagtaaaggactgagtaattgaatacctgactaaaactacattcatagacatcctgtgaagtccaggggtacatagtaaagctgctagttttgcaacagtttcttccttttttgatttgaagtaagatgtgttttatgtgccaggggatctgagttattaatggcatccatccttcaccgaccatcattttcctgggaacaaaccacggtgtaatctgagaaggagaacatcagaaactgactcaggatgcggtgggagatgtagtcctgtaaacaccagggacactttgttctcaggcaggggacgtagaaagggaggtggtactttccataagagatggggatgttctgaactacatcagacaaagaaatcacaaactttccatctctgatgttgggcagaggtgttaagaaattaaatatatcttcagtcaggcacagtagcctgcttctgtaatcctagagcttggaagctgtaggcagcagattcagaaattcaaagtcatcctcagctgtatgatgaggccagcctgggctatatgaaaccttatctcaagaaagtaaccaaaccgaaacaatgacaaatataaacaaacaaaaggaagtccagtgaggtttttgatacagttttcttgcctaaagggagacatttctagttgggtggggctgtactcacctttaatgccagcactgaggtgagagttccaggatagccaggggctacatggagaaactctgtcttgaaaacaaaacaaaatgaaatgaaatttctgattctgttcattacatatgtattaagattgctattatttgaatataattttcattctccaactaccatgctagtggaccaatttggtggctctttggttccatactcctttgatcctagcacttggcaggcagtggcaggcctgcctatgtgtttcaggctagacaaggctacacagattgtttaaaaacaaacaaaaacaaaaacaaaataacaacagcaactcattttccatacacaaaaacatgttattgcctggctgtacctgcctctaatccccaggatccaaacaacaaaacaaaagagtctttgttgaaatttaatctccattatgaaatattagtaggtagaatgaggtgagacttttaagaggttgtcagggctttggtttcatggctagtttaatgtttaaaattgtggattaataaactaatggtttgttaggttaatgggttatcttgagagtgagtctgctctagatccagtgtggctaggtttcttacacataccttgtctgtcacgatgtgataccctactctgcctcaggactctgctagcacacagagcaccatcagatgtgccccatcaatcttgtcccacattgtgagcccaaatgaaccccctttctttacaatgtactcagtttactgtgttaatagaacacgcaaagaggaaatctactgcgtcactgactgctggactccagagagcaataccaaggatgactcacatctcccttagagaaatgtcctgaattcacaagctactgctctcgtccttgctcacttgctccctgctatttcggcttctttgcttttccacaagcagactgtgcactctcttgttttacagactttacatttactgcttcttctgccggaatgtctctcatcctaaataatcattttcatttttttttgtgtgtgtatgtaaggtgtgtgtgtgtttgtgtgtgtgtgtgtgtgtgtgtgtgtgtgtgtgtgtgtgtgtgtgtgtgtgtttacatgtgtgtatgggttaaggtacacacggaggctagaagctgacatcatgtgtctgttatcacttttaaccttatttttaaaaatgatttaattggagcatttaaaattgtgtatatgcctcatcctgctctctttcctctattcttcccccaactcaatatttctgcccctccatttcctcttctctactcctcttctcttgttcttattgtagcagctccttcccccctaccctcatgctcccaattagttcaggagttcatgccacttccattcctggggaccatttatcccttagagtccttcatgtttcctagtttctttggtgaagaggattataggctggtaatcctttgctctatgtctaaaattcatatatgagtgagtacataccatgtttgtctttttgtgactgggttacctcactcaggatggtttcttctagttccatccatttgcctgcgaatttcaagattccattgcttttttctgctgagtagtactccattgtataaatgtaccacattttctcaatccattcttcagttgaggggcatctaggttgcttccaggttctggctattacaaacaatgctgctatgaacatggttgaacatatgtccttgttgtatgaacatgcactatttgggtatatacccaagagaggaatggctggatcttgaggtagactgattcccatttttctgagcaaccgccatactgatttccagagtggtcttacaagttcgcactcccacgagcaatggaggagtgttcctttttctccacatcatctccagtatagattgtcattggtatttttgattttagccattctgacccatgtgaggtgcaggatgagagataccatatcagagggagccactataggtctgagaagagatctggaactagggagatctccagacacctacaaggatgacacgatctgacaatccaggcaatggtggagaggataacctaaaagcccttcccctaaaatgagattgatgacttctctttatgccatcctagagccctcacccagtggctgatggaagcagagacagacatccacagatatacactgagctgaaatcgggaatttagttgaagagagggaggaatgaagagcgaaggggtctgtaccaggttggagaaacccacaggaacagttggcctgaacaagggagagcacatcgaccccagatgctgtcggggaggccagtacaagactgatccagacccctgaacatggatgtcaataaggaggcctctgcactccagggagcctctggtggtggattagtatttttccctggtgcaagaagggactttgagagcccatcccacgtgaagggatacactctggccctggacacatggggaagggcccaggcccagcacaggaagatttggtggactttgcagagcccctgttgagggccctaccctgcctggggagtggtgggtggatggagtgggggtaggctgggggtgggggaggagggatgggggtgaggggagggagagggagaagggacttacatgtgaaacaagcttgttccctaactagaagtaataaataaatttaaaaaattgtgtgtatgcatgtgtccttggaagagtatgtgagtgctctgggagtctagggctgtgagattccctggtgctgtagctacagatgcttatgttaccacctgctgttgttgttacaaacggaactcaggtcctctggaagagcagtacatacccttacctgattagccatctctaggacccttccaccttatttttttgagacagagtgtctcactgaacctggagctcaccaatgtactacattggctgaccctcaagcccctgtgaccctccagtctccaacacccagagactgaactcaagccagcaggcttggtggcaagagccctctttgtggagccattttctatcaactctttattatcttcttaaaaattctttctacaaggagaccctccctgggacctcatatgagaagatatgcatatgaatacatatacatcccctcacatttatttatcttgcactattctcttatactagtttgcttttttcctatccattttcttatcagtcatgcgtatttttgcttactgtcttcccccatgatcatgtgagttccatgaagggagaaaaaatatgtctcctctgctgatagctgatttctcatggttagaacagtccccaacatgttgtaaatacccagtgaatagcatggagagaatgaagggatgaagtgagcaagcagatctccagaagctctgactctggttttatactctgaatttctgaggatcactagtcaagttctacatgctgttagatactttcaggtcaatagctttctccctgctcagcaaatgactgatggcagaagagaacatgaatgatgagatctctttttgttcctatcctcttttcatcttgtttcctacgacttcaactctgatttcagtagttttataccttgagcgtctacaaaagttaccatttaaagacagagttccctgtgccaatcactgaaatataagtgctttccagaattgcctggactttctctaaggagagttaagtcttcccataacgtttctaccatcacttctcaatagtcaggaaatatctgaactgaatgaatgagaaggctctggagtcttgcaaaggtcccgcccactccaatacagaacagttgaacacctgaaagaaaggcactgttcagtgttttaaccacattaacctataaaagtaatatagtgctaacattttttttattctacttggtttatattttactgttagataactttaatcaaatacaggtctttcttaacaaaaacgaaatcttcctaaaaaatgttcatatttgtaatcaccatcattaccagggaaacttttagaccaacaatagtacccaagatttcaacaatgaataattgtttggcttcttcacagttgcatactctcggctgttttaacgaacagttgggaatgaccttgctgctcagtttccacacaacccacatgtccttgtggttcttacagttgccatctagacaaacatgtctttgtgttgggggaagctcctactttagttttcctgggtagtttgagccagatattgggcacattaataaaattcaacatgctgtgaggattaaggcattccctgcccttgacttctatttctctttgtctccatgactctctgaacagaataagtgcatgtcagtgcccagctgaaaggaatgacagtcctgggaacattggtgttgttgtgtgcctagctcagtgctaagaactccaggacagacctcaaagagatatgagattgtacaattctcttccttccaccttctgagtaggagagggtctagagatcttttgacttgttttgctaaacattggtccctgaactacattctgtgtcagaggttctctttaggagctgtcctactgattccagggtctgctcccttcagagtatcttatacacacccttcctgtgccactagaagctggtctgaagaatcctgggttttgggtcacaagccacagactccagatccagtataaaggttatgctagccacaaagtcatattgctgccatctcagaattgtgtggaatacatgaggcttcgtaaatgggttggtagagaatagataagatagttattaagccctactttattttatgaccattttaacaatgaaaccttcaagacctccccattacacacagaataaagtccaatgcttgttataaaaggtcttccataatgtcatagataatatagatcttctacatagaacctgttcttcaagctacccaagaatcttgaagaatttctacaacaaaggctttcctttaaacatctgtaacttctgtaaatacagttccatttctcagaatgtacctccacttacctcgaccaattgaaaacctcttcattttcaagctcgaatttaggtaacatttcttattcttttacatcaggtacaggccatttggtccaccaatatttcactgtgaaaaaggagatacgtggcttccttgaaaaaagtcttgcggatgagcacaagtattggtgtggttgattttaaataattctttaattaaatgttttgaatggccttgccacttagtgaatatctactagcttatttatttggtagaagtcatgggaaactagagatttgtttttaaataatttttaagtctaatttggggaaggagaggtagtcacagagctgtgcaaacatagctctagattctgttgacccctccctccctccctccctccctccctcctccctccctccctcccttctttctttctttctttctttctttctttttttccctactttttttttcaagagggggttactatgtgtagtcctggctgtcctggaaatcactctgtagaccaggttgaactcaaactcacagagatccacctgcctctgtctcctgagtgctggggttaaaggtgtgttccaccaccatttggcaattctgttgatttctgaataaagcctcccttagagaataaactttgttctctgtttactttgcaatcttctatgtctcctcttgtctttcagcagccctgcagcctcattatgtgtagaggagagcaacttgagactcagaaaaaaaattttatcggcttcacaaagttaaaagacaagggcagaactaggcctcaaaaaacagatctgggtgaaagtcaaatctttaccagagctgttgtctggtacttggcaaggtttcacttcaagtttttacatttattcattttcatccatccatccatccatccatccatccatcatccatccatccattcatgtgcatgtggcataatgtgtgtgtggaggccagaggacggctttcaggtgttcatagtcttcttccactatgtgagtctcagggattaaactcaggtttctaggcttggcagcaagttcctttatatttattgctgctctcctgcgactgatgtagccattggaagataatttgaaaagtacactgtggtggtttgaaagaaaatgatccccaaagggagtggcactattaggaggagtgagtttgttggagtggttgtgcagtcttgttggaggaagcatctaactgtggaggcatactttggggtctcaagtatactaaagctatccccagtgactcagttcacttcctgttgcctgcaaaaagatgtaggctacttggttactcctctagtaccatgtctacctgcatgctgtcatgttgttcatgatgataatggacgaaacctctgaaaatgtaagccaccccaattaaatgtttttcctttataagaattgccatggttatggtgtctcttcacagccatagaaaccctaactaagacagatccctatctttaaaataaccatacattcttaaggtggcaacacgggcctggtagcacacacctgtaatccaagctacttatgaagctgaggcaggagaatcataaactcaagtgttcctgggatatagagtgagtagaaaggcagtctgaaaagataatgaaaaaaaaaaaaaaaaaaaactaaaaggagggtcgagagtgtagcttagtggcaagagtgtttgcctggaatgtccaaggccccggattcagtcctcagtactggagagagaataagagcaagaggcagagtgtgtggagggggagacacacacagttcacaagagtggagggtgttctaggtggttatgagacacaactagagataaaacatatgtttcagatttataaatagagcacagaagaaggggtgaaaaaggactctgggatatgagaattggggacttcaagaatggaagtcacctatgggccctgaaaactcttggaggaactttgggcttggagctgaagctagtaggccttctagaaagagaaaatgtccacaccatggcaataagatttgcccagctgaaatgagagctgagatcttcaaaggaactacatgagtcaaagtccagtaagataaacagcagagatccattgtgaaacctcagaaggccagaggtttaaaatggcagtttcacattcatgctatacatttgaagatgtgtgtcaaagtgaaagaaaaaaaaaaaaagggagaaggtgtaggcttgggtaatatagaactgaccgtgccaccaaagactgtggggaatcagaaactctctaaccttggtatgtcacgctggacaggagtgtttgtgtgtgcctggaaatccttgttagccagactaacaatgattagtaatagtttagggtgaagactttgtgtcacactttgtcttagttagaatttctgttgctgtgaagagacaccttgaccatggcaaatcatataaaggaaaccatttaattagggctggcttatagttcagatgttttatccattgtcatcactgtgggaagcatggtgacacacaggcatacatggtgcctgagaagtagctgagagttctatatccagagacagtgagacacttggtatagtaaggtttatttttatcgactttcttttggactaccagtcctcaaataatgacatggagataattatgaaaggttgaccttagcttaggcctattcccaactacctcttataacttaaattaacctgtttttattaatctatgttcttctaggtgattttttacctttcctccataatgtatatccaacttcctcagtgtcttgctgacatctcccctgcaccaagattctaaccctgagttcctctctttccctggaaatcccttgtagtctctcctgcctagctatgggccattcatctctttgttaagccaatcagaaagcaccttggcaaagacaaatcttcacagtgtacagaaagattatctcacaacaattaggcctggtttgaccttctgagacctcaaatcccacccccagtgactcacttcctctaacaaagcctcacctactcaaacaaggccacacctcctaatagtgtcactttctatgtagggaccattttcttttaaaccaccatacactgcaaaggggctggaaataatagactaaaacaagccatgtaggcagccatttttgtttctgtaatggagcctcagtaaacacttcctgggcctctgtgcttcctgtcactcattgtggtcagaaggtaatgatctgaccccttaagcaaggacaaggaagctctgtatcctagtggccctagatgtcattctgcttcctctggccaatttcaaccaacgtcctttcttgatgaatcttattttcccctctttaaaaggcatttatttttattccttaatgaaatacacacacacacacacacacacacacacacacacacacacacacctattttcacattctctacagtgactcttaatcatgagtacaatacctaggcagattcttggagatttttctagaaaaccatcaaattgaagactatagtttggagaattctcccaacttgacatagatatcacaaatgaagatgatcatttgtaggttatattccttaagtttgcagctgtctaggtcttctcaggtagacaaagagtggtaccagatatgaggctggattgcacaacagccagaatgaccactgtgcagacctggaaggacatctgtccaattcagagcagagctcagctgactcacagaattatttcaaggaaaacataatgtacatatcagatagctatttacatattagaatatggttggaaaacctgttttaacgttatcttatagggttaaaaacaaacaaacaaacaaacaaaaacaactaaatgaccagaaactccagataaatcaaatcatgttacaggagtgtcatcttcttaatgtgaaataatttaaaacatgattttatttttttagcagttggtaaactataagagggggctctatttaatcttgatgtctctgagtgacacaagactcatgagatcagaattatcccaagagaatgtagttatcagcactctggtgctaccgtgaatgacttgcttagtcataataatgcaactttgtttattgactgtggaagtttgaataaaaatggccccataggctcacaggggctgacattattaggcaatatgcccttgttccaataggtatggtattattggaggaaatgtgtcattaggggaaggctttgaggtttcagaagctcaagccagacctaataggtctcagcatcttcctgctgcctgtggatccagatgctgaactctcagctccttctgtagcaccatatctgcctgtgttaccatgtttcctgtgatgctgataatggactgaacctctgagctgtaagccagccccaattaaatattttcctttataagggttgctgtggtcatgctgtctcttcacagcaataaaaaccctaagaatttggctatcaactttttaacaaatctggcaataaacatagaggaattaattgtgattaagagtaaagtatgagttcttccaactttgatgatgttaaaactctagttgatagatctggggaaatgaaaggtagctaagatagggatgagcaatagtgaaggaactattgccttcattttacaaagtgagaaaaaaggatctgatgaaaagcttaaacattgccaaaagtggtcctgctgagagatgcagaagatattgtgttatcaaactaaaatgaaggaagatgatgtaattcaatctacactgtaaataaaatgtaaagtctaaatagattgtagactctatctatgaaaataatgtgaaaaaaggttcatggtctgtatagcaactgattttataaaaatcatttttttccagtgtgctgaatattaagaagcactggccttagtcaggagtggcctgtaatcacacctgtaatcccaacacttggaaggatgaggctagcctaggctacatagcaaggtactgtcttacaaacaaacagatgaaaagaaacagcattcataaaattaaggactgttgattttgttataataaagttacaaatattaaaagtgaaataacaaaaaggtatgccatcaatctggaggtatttgcaatgtatacttcatagctatttgttacaaccagcaaaggctcacatctagaatattgaagaactcatgaaactcaataaaaaagaaatacccgatgggaaatggtcaaatagactcaacaactacaaacagacaaaacaggctgttctggactcagtggctaagagctcttgttgctcttctaggggacccggatttgattcccagtgcctacacagcaggtcacaaactgtctgtaatgcctgttccagaggatataatgccaacttctggcttctaagagcaccttgcctgcacatgttgcacagacatggatgcaggcagaacacccatacagataaaatttaaaaaaaaatgactacaagcaacacatacacctacaatataaacaaacaatatacaatataaacaaacaaacagcacctcccaaacaggctgtgctaaattaataaaaagtgtgataaaaggcttactattattactcaccagagcaatgaactttaatattgcaaagggtgactgaaattaaatatgtactgaaaagctaagagttgctcagggcatggggcatcagacacccccgcccctcctttatgctgctagtgggaatggaaattttcttaaccaatttggaaagcaatttggcatatctgctaaaaataaaaataataatctgttttaaataataaatgataaataaaagaaaacttactacaacttctttcaaaagagacaaaacttaagaattagccaaatgtccattggtgggagaatgggtcagggtcaggtgttttcaggctctcggactctgatttaaagaactgaaaataaggaatcacacagatttgtgaagtagcagagagtagctgtattcaaaagcaaggcaaacagtacagattagtaagaaacacacaccaaggtgctgtgcatcccacgataagaaacagcccaaaggccatgatagttgtttggggattccttttggttttttgagacagggtttctctgtattgctttggaggctgtcgtggcacttgctctggagaccaggctagtctcaaactcacagagatccacctgcctctgcctcctgagtgctgggattaaaggcatgagccaccactgcctggcaaggagtttggtttttaaagggtattgcaagggtgattctcttttgattgactggttatgtcatacaatcttttttctactatgtatgcccttttccatatttcatctgattttaatcatatgcgtatttaattaaacatatgaaaaaagtggtaaatataggattcactctaaaaatttacttgaggacacagttgtgttattattcatgcagcccaagccagtccaggctggattagcttttctattctttacaatgagaaacaacgagagtatatttaaacagaaacctcctaactttttttgttttttggttttttttgaaacagtgtttctctctgtaactcactctgtagaccaggctggtcttcaactcacagagatctgcctgtctctgcctcccaagtgctgggattaaagacaaagacgtgggccaccacccagaaacatttgtatttttaaagaattactatattttcatttttgtgcatgcatgtgtgtctgtgtgggggtatgtgtacatgaatgtggttgtccttggaaaccataagagagcaacagtgtcacagatagttatgagccacaatgtgatacagagtgctgagaagaaaacccaggtcctctggaagagtagcacaggctcttaaccactgagctatctcttcatccctaaatgtaattgctgttgtgagtgaagaagcttacaacattgttcagatagtcatgcatgtatgacccagtgcagatgggtgtatgtgtcttggttaggttttttattgctgtgaagaaacaccatggccaaggtgactccttttttaattattattattaatttattttttacattccaatcccagttccccctccttcctctcctcctgctcctcccactctctcccacctcctttttgatccttaaagagggtaaggcctcccttaggaagtctactaagtctgtcccatcatttcattgaggcaggatcaaggcacctgccatcccctacacccctgggtctaggctgggcagggtagtctccatatagaatgggctccactaagtcagtttgtgcattagagttagatcttggacccactgccagtggcctcatatattgtccagccataccattgtcactagttgagactagttcggtcttatgcagggtctccatttgtcagacctgagtcagtgatctctcactagctcgggtcagctgattctgtggtttccccatcatggtcttgactcctttgttcatatttttgctcctccctcacttcgattgtactccaggagctttgcccaatggttagtagtggatttctgcatttgcttctatctgtttttggaagagggttctagcttctctggggttgtggattgtaggaaggacatttgctcaactgtgttcatagcaacattatttgtaatagccagataggaaacaactagatgcccctcagctgtagaatggataaagaaaatgtagcacatttacacaatggagtactactaagcagtaagaaacaatgacatcctaaaattcgcaggcaaatggacagaactagaaaaaaccatcctgagtgaggtaccaaactaagaaaggatatgtgtgcatagtacatacagataaaggagccaggttgcttagggcattattagaagaaggggtggtgtgtgagtaactaaaaccaaatagtgcagcttgataaataaaagacccagagacagatattggggttcaatctgaagatcaaaaaagcaaagcagctggcttctagctcttacctttacctaagactgaaagacaatcttggttccaccaaacctgaaatcctaggttgctatgctctcctcatcatggctggagaatcctgagacttaaggtcttcctatcttcagtgtgtttggagaatgaatgacagctctgagaccttgttcctgtcttagaaacctctcatgagtcctgggattaaaggcatgtgatccctttgtgtgagctgtttctctttaggactggatcaatttcgtgtagtcagtgtggttttgaactaacagagaccagtctatctcttaatcctgagtcctgggattaaaggtgtgtgccttgcttctatatttatagctcactttgctttctgaatccccagtcaagctttaataaatcacaaataatgaatgcatcgccacaaaataggatcccagattacactagctcctatgctcgcctgcttcatttgttaggggagctgaagctagaaggtcatccttcttggaactgcttcatgctgagtgaatagggcagaaacagtctctcctattctgtccctaaagctgttgtatctcccggggccccattggagaacatccatagaatttctcagcttgctcatccaggattgaacagatgtctcccttggcatggtcacatgagggtcctcttttgttccggatggcagctgttgttgaagggccatctgtaaattgacctgttgggtctggcgggggtggagggatgggggtgggggtggggctgctgccatggtaagaaatgctgactatatccagcttgtccagcttggaaccaaaacactattgcccaactaatcaaccacatcagcccctcagagatcactgatatgctgttgggcttctccacatttatgagttagaagcagcattcctcctggaggtacgcacaaactctctcttgtcctgcaaccattcggtctaacactcttcttttttggaggactgctgctgccagggagtccagttgaccttgaatttgggctagcccctcttcattctttttgcatggttcttttgatcattgttttggcacatatagttttccctcagctaccaatataccttgcccaagcaagctactcagagccatcgcctgtgggatcagaggtgctgcttgtgtgtgaacattggcactttatgtgttgggaggagcaagacgacatcttcccaggccacccaaatatttgctgttatacaatcaagtaagcaagtgcccctctgaaatgtggtaatagtaaaaaacaaaacaaaacaaaaaacccaaacaacaacaacaacaaaaataaaacaaaaccttttttattataaatctagtagaggtattatgaatcagctgcttgactcagaagtgcaagatgtaaaacatgatcatctcaggattttatgtggtcaatgattttgaggccaatacggctccaggtagcaggttgggtacacactttcaggcttggctttatagagtcattccttgcactgataaattggcaccaggtcaaggggaaattctaggtcactggctagatttgattgtctagtctttgaaagaataaagtactgcttttgggatactctaagagccaaaagaatgtgtgggggaaacaattatctttagtagatttttgtagaaagggaatttgaattggtcaggtatgtgcccccctccccaggaaaagcctgaggtgagttggctctaaatatcaaaaggagtagcaggagcaggggacaatgcaaaggagaaagttcctgaaaggatgtggttcagagtctttaaagtgtaaactctgctgagtaggtaccagcttagggtttagacaagaaagaagaatttgtaggaactgatagactgaattcctttgcagggatctgtaacctcctttgtgtagggaaaaggggaatttaatagttgagtctccagttagatatgccaataagagcctgtggttaaaaaaaacaaacaaagaaaaccaaaaatggttaattcaggaatggatcatgcatccattcagttcctcctcttcctattcttgttttttgtgtgttttgaggactgaaactgagtgtttactggcaaataaacctctgctagagctgggtggcccctgtgcctgcgctagctgcatattgtcccttcccagtgtagtaagacgtaaccatcagggtttagtagagtttagaagagtttcagtttgatgagtcaaatcacaaatactcaggaagctaggcttctctctacctgtcccacttttattgaaaatgcaaaatatatctggattatgatttcctctccttctattctagttccccctctgatctggacccaccccacttctgtctctcattaggaaacgggattctagctgggggtagtggcccatgcctttaatcctagcattcatgaagcagaggcagccagatctttgggttcatgacagcctggtctacaaagaaagctccagggcaaccagggctacacacagaacccctgtctcaaaataaaattattgctctagctagaacttcgtgtactatattgaatagatatggagaaagtaaacatctttgtcttgttcccgattttactggaagtgttttgggtttctctctgtttaaattgatgttggctacaggtaagtcccttgtgtcctctaatttcttcaggacttttatcatgaaggcacatagaattttgtcaaaggccttttctgcgtctaatgagatgatcttgtagtttttctctttcagtgtgtttataagatagattatatttattggtttatgcacattgaacctcacctgtatctttttgatgtgttcttggatttggtgtgtaagttttacatctgtgttcataagggaaattggtgtgtaattctctctctttgttgggtctttatgtggtttgggtctcaggggaactgtggccttgtaaaaagaattgggtaatgttgcttctgtttctattttatagagtaatttaaggagtattgacattatctcttcattgaagtcttacaattctgagctaaaaccatctagccctgtttttttttcttttttttggggggggggagacttaattctgcttccatttcactagggattatagtatatttaaagtgcttatgttgtttatttcttgtagattttccaacttggttagtgcaggtttttaaagtatgtccttatgattctctggatttcctgggtgtctgttgtccggacacccttttcatttctaattttgctaatttgagtatttttctctctgcattttagttaatctggataagggtttattaatcttactgattttctccaagaacaactctctgtttcattgattctttgtatttttttcttgttatttctattttattgattttagtcctaagttgattatttcttgctgtctattccttttgggtgggatttttttgttctgtccaaaagcttttttttttttttccttttcttttggtttttcaagacagggtttctttgtatagctttggagcctatcctggcattcgctctgggtgacctcgaactcacagagatccgcccgcccctgcttcctgagtgctggattaaaggcatgtgccaccaacgcccgactgtccaaaagctttcaggtgtgccgttaagttactggtatgaaattgctccattctttttttatatgtaggcacttagtgctatgatcttattacctcttagaactactttcattatgtcacataaagtttgaatatgttgtatattcattttcaccgaattctggaaaatttttattttatttttttgaaccatttttaaattttttttttttaaagacagggtttctctgtggctttggaggctgtcctggaactagctcttgtagaccaggctggtcttgaactcacagagatccacctgcctctgcctcccaagtactgggactaaaggctcttgccaccactgcccggccatgtttttaattcttagtgggttgttaagtttgcatgagtttgtaaactttcccatttttctgttgttgttgatatctagttttaatccatagtgttcataaaggatgcagggtgttacttcaattttcctttatctgttgggatttgttttatgtctgagaatgtggtcagttttggagacagttacaagaggtactgaaaacaaggtgtattcttttgtgtttgggtaaaatgttcttttaatgttagttaggttgccgggcgttggtggcgcacgcctttaatcccagcactcgggaggcagaggaaggcagatctctgtgagttcgaggccagcctggtctccagagcgagtgccaagataggctccgaagctacacagagaaaccctgactcgaaacaaacaaacaaacaaacgaaaatatcagttaggtctgtttggtttattttcaattaactccagcattttcgtgcttagtttttgtctaaatgacatgtttattagcaagagttgggtttgaagtttcctgctatcaatgtatgagggtcagtatgtgcgttaagctataatagtgtttcttttttgaacttggcttcccttgtatttggtgtataaacattaagaatttcagccttaagctctcatattattattatttttatatatgcgtgtgtgtgtgtgtgtgtgtgtgtatgtgagaaagagagagagagaaagagagagagagagagagagagagagagagagagagagagagagagaaaggagagagagagggagagagggagagagggagagagagggggggagagagagatatctttaataccagtacttgggaggcagaggcaggtggatctttcttggaggatatttgatcacactctgcaaagatatatctctgtccttccttgtctctctaaggtaccttctgattgatgtaataaagagctgaattgccaatagctaggcaggagaggataggcgggactgctggggagagagaggaacttggaggaagaatctgagaggtgagagattcaccagtgtggcgcagaggaagttgaatgtatggtgttgagaaaatataatgaatcatgtggaagaacataactataaatgggttaatttaagtttttagagttagttgggaataaacctaagctttcacacataataaaaacttccctgtcattattcaggaactggcagtacaaagacctgttacagatctctgagagtttgaggccagcctggtctacatagtgagttccaggacagacagagctatattatgagaccctgtttcaaacaaacaaaaaacaaacaaacaaaatagttattatgtcctcttgtgaatttttcctttgattagtatgtagtgtccttccttatttcttcagattagttttggtttgaagtctattttgtcagataagaaaatgacaacaccagcttcttcttcaatccatttgcttcaaatatggttttccatattttaccctgaggtgatgtctattcttgatgttatggtatgtttcttggatacagcagaaggatgggtcctgttttcacttttttctgctaatctgtgtcttttattaggaaattgagaccactgatgttgagagatgtcaatgagcagtatttgtttatttttttgtttgtttgttgtggtggtggtggtgatggtgtggtgtgtgtgtatgtgtgttttctctcttgatttttggtgtgcgattatttactctatgtgttttcttcagtgtagttaacttctttgtcttggagctctcctctaataccttctgtaaggttggattatagataaatattgcgtaaatttaatcttgtgccttgataagcatctcctttaggttagggaaattttctactatgattttgttgaaaacattttcattgttattggaagaaaaaagagtttgttttccttcctctattgtcattattcttaggttttgtcttttcatagtgacccagatttcctgtatgtttttgctaggagtttttttggtgttaacattttctttgactggtgtatacattttttctgtcttatcttcaatgcctgagattctctcttccatctcttgtattctgttggtgagtcttgcccttgaggttcctgcttgagttcctaaatttttcatttccagatttctcccagaaataattcacttacactttcaggtcttgaactattgtatttatttccttccctgtttgtgttttcatagatttctttaagatatttattaatttgttccttaagaacctctatcatattcataagggttattttaaagtctttattttgtgcttcagccatgttgcaatactcagggcctactgaggtagggttgctgggctctagtgaagacatatcctggcagttattgattgtatttttatgctagggtttcggcatctgattttgggaatattaaaattctaggttctgaaatcctgtctagtctttttgtgtgtgggtgttttattcctcggtttctgttgccttctctggttcttctgagagtgtagtgattgggttgtctagtaggacatttttctgatatcctgataggtgtggccacagggggttctggataaactgtgtttttaagtattgggagttgacacagaaatggggatgctctgatttgaggcggctgagggtgtccatgggagggagggagggaggagagcaggatgttccaccagcatctgcttagttcatgaggaatgaggaaagagaatgaggagaggccacaacaggtagtctgtatcagggctggagatgagactgggagattgtatatggaggagagaagggagaatgaagatcagaaacttgcctacctacttcactctccgacaagtttggctggggatttctcagagaatgcctgatggatttgtggcctgagataacaaggagaatggggaggaacaccaatggagatatgctgtggagctatctttgcacattgtaaatatgtattattctcattggttaataaagagccgactgtcctatagctggacaggaacagattgagtgggagagccagactaggaggacattgggaagaagggcagagtcagagtcacaggagttgccagccaaacacagaggaagcaggacatgtatgaaataaagtaacaagctgtgagccacatggtagaacttagataagaaatatggagtaagttgtaagtgctagttagcaataagcctgagctattggctgaggatttgtaattaatatcgtctccgtgttggttatttgggaactgacaggcagtaaagaaacatctgcctgcagagatatttgcgaacaccaatagaggcagagaagtgtggggctcagcatgtgatctgctacagagctggggatgagactggagggttgtatttagaggagagaagggagagtgaagattggaaacttgccgagctacttcactctctggcaggtttggttgcagggttcttggagaatgcctgctggagttgggacctgggataaagggatgagtgaaggagggaagtaaggaagggaagatctaagtgatccactggagatgggggcagagaggaaggggaagctgcagcaggtggtctacttcagagctaggcatgagactggggaattggacgagaaggaactgagagagacatgaagatctgcagtcagcctacctgcttccctggctggagttttggaagctctgtaaaaggaaatagaaagaagcttagaaaaatggtcgaggttggtactagttggcagccatcataatcaagcaagctgattgtggtgagtttctgaggagcattgacagatcttcagttggctcccaagagtattccattgtttctgtttattctaaagtcagtgggatgggcttaatcatagaaagatgaaccccatggtctacttcaaagacctttaccaccagagtgaccaggatgacagtgcaggctctctttaattttgaagtgagtgggtcctatagagacccttctttcaagttttttctagtactcatttttaggggttggtcttgagatcagtgtggctaagacctggagcagggaagccggaatgccaacttttcttcattcacccaccaatcactttcttttgtccccagtaagttttctcttcactagaatatcttggttctaattcctggttgcagggaagtatgcagcacaaagggaagtgggtgcagacacatcaccctcattatgtatgtactctccattttttagcaaaactcactgagtctaattagtagtgcctactagaacattgagtggtattctcttgatcttgtgtgggcaaccatgagtacaatgggatggcttctatttgatcttctacactagtaacaattgtgggcccaaaggacttacttgtaaatttggatgaaattgaatagacctcttattttcctgtaagatgaatctgcttactcacaatgcccagagttactcaaggctcctcgaagtgatggtgatgtttctggctggggcaaggaggatatgccttgtcttttccaagacttgacaaccagttctctaaaccagagatctgatccagtttcttggcaaaagtgataggggcccactggtcagccatcacagggaagttttgcttcaaaacacatctatgtgttgagtgtttttagtgtatgatctttttcagaagccaaaacgaagttttatatgaagaggactagggttctaaagcaattatttagataacaaaagtaactaaaaaacaaaacaataacaacaacaacaaaaccacagcaacaatattatacttgctaaaaaatcgagatatatagaaaagtcaggtaatgagccccaaatctctttagtcactagaagtgaacaagaaaacatctaagtgacattcagaaacaagagccaaaccaagctatcaaagtgctgttctctaggctatgatttccttcctccctccttccctccctccctccctcctttccttctgttctctgtctgtctgtctctgtctttgtctctgtccaccccccccccatcttcttcctcctctaatttcgtactggggattgaagctagagatcacatgtgctaagcaagctctctacttggttctgtactactgagttatacctcagccctgcttttacactttattttgagacagtcttaccaagttgcccacattgtctctgactcactctgtagtctaggccagccttaaatttaggattctcctgctttagccacctctgtacctaggttacagacttgaacttccgggtctgactccatttttttttttttgaaaaccaatgtatacttacttgttttataatgtgggaaaaccacattaatttttctttttttaaaaatcaagtaacaacaacaaaaaaatgaggtctccgtgcacagtccaggatatgctaaaacttgtcatcctcccattttagtttcccaaggactaggactacagaattacatcttcatgctcagcaccccaccctcttcctggggattgaactcagaagctttaatccctgaggccatagcttgctcctacccaaagttacatccttatctctattttgtaattttgtttgtttttttttttgtggttgttttttgtttggttgtttttcttttttgaaacagagtctcatatagttcaaaatggcttggggctagcatcaatccttctatctcagcctcttaaatattataataataagcatgtgccatcatgtcttgctcaagttaagtacatgtaaagtacactaataaataacatgaaaattgcatttcaaatagggaagttattttttaaaggcttgtctgcttttatctttttacattaaaaaattttaaagaaaatgctctataaaaggtatgcaggttttcattctagagtacttgtcaacaacaacaaaaatgatttaagctggtatggtagtgcatgtgtgtgatctcagaactggggaagtccaggcaggagctgcatagcaagttcaaggttagactgaactacatagagagttccaggtcagtcagagctccatggtggatcctgtctcaaaaaggacccctccccaagacgttttagacatggtctgaccatagaatgctgctggcaaagttgttcttgtctctgaaggttctatgggtatttataactattaaattatatagtcacatgataaaatggaatatgaaatgtgccaatattcatttagtgttaaaccaagttgtaacttttgaatttctaagttaaggctctaccacattaaaataacttctaaagctgggagggattaaagtctaagaacttataataaaggtgtgtgtgtgtgtgtgtgtgtgtatatatgtgtgtgtgtgtatttatgtgtgccagatttttactgcatagcctaggttagttttaaacaggtcattctcctgtccctacttcttgagtacttggattataggcctatgccactaccagattaaaatcacttaaatatttgtaaaggaaggaataaatttaatattatttcaactcagtagttcttttttgctttctatctaacactggaaaattaaatacaacttccccccagggaatgtgttatttatgccaaggcagttaaagagcacatcaattaattattcttataaatccaagcagtttactttctgcccactgtaaacttgcttttgaaggaatatgtattgagacatctggaatctttgcttttagagtttgaaactattttggtctcatttccatctaccatcgactatccatctgctcactcagtgtcttggtacttctgagtgttgacaataagaataataaaagtacccattgtttgcagccacctatgggtccctctcacctctgggaagtgaccttgttgctggtccttttctttggccttgtgacctcccatgtgtccctgggcacattttctgtgcacatttctgaagagtggaaagcatcgattatgtcttcttccccaagaaggttacatttcaggaatgagatgaagtaaacagatacaggcataaggtcaaccaatccattttacaaacaggattgagaaatagccagtgtctgacaactgtgtgtcctgtaacagcagctgactcctctactgtgtcggcttggtggccctgtgtactgtacatcttgagccttctcatgtggcaatgttcttggtaaacagtatagccaggaaaagggcaagctgaacttggttggcaaaggtacaccttatgtgtgatggagggacagttggaaagtcttgagcaatcatttagatgcccatgtgtgcacacattcaggctttatgtgacatgcaatgattcatctcctaagaggctgtttttctctcttccagagctggcagtcagcctcactttcagaaatgggagatttcttgaactaatttggacaagtaggctgtgttttttagaccatgaagcagtaactctttgtccagacagaacagccaattatctgtgaacttctcttttcaggaaagagttcaaaaaagaaaaaaaaaaaaaaaagcgggatctttttaatagtctgttttacacggtgacttgcaggagaataataactttgtgcctcttctaaaggagaaaggagttattaaaaatgatttgattatcttgataaagaaaatgctatagttgaaattcattttcgaaaatttgccttggatttggtagaacctggcaagtgtaaacttgggaattaaatttcagactgtagaagagaaggtgtggagtcagtccttcgtctcccctatgctgtagtttcctaatctgctcagtgaaaaggaaggcagttgcttttctccctagaggaacacaggcattgtagatgctccgaagacaaaaatcagtgcaaacatgctcgctcacctatgtgcaaggctgagccacaccatggttcagtgggcttcttcaggagatatccttgtcttgtgactgtcacatttccctggcaaggaaacagtctacatctgtgctgaggagccacagatttaaagaaaaataatttgcttttcattcatgtattctcagtacacggttaattaaaaaaaattaatttagattgttttttttttttaaattgcgtgtgtgtgtggggggggggcaggagaaccctgtcctgtctctttggggaagtcttttaaattagcagcctgtgtgctgtcatgtgttgttaggtctgtcaccaaggacctcattgagtgtcaacctaggagcctaactgtgtgtgaacgcaaagtaagtaagaaagatctttgtagacaaggtcttcacctcccatgggggagaaatacttccaaataattatagagctacgaggtaagtgttaggttagcagcagacacaactgctctggttacagtgcctgggctgctagagactgaagaagaaatgtctgtgtttgaccctgaagactgagaagaggctggaggtgggaccacaaatccagcaggcacagagaagaggttgtcagcagtttacaaagaacatttcaggatcacagagttctcgaaggttacacagttctgggtacacacagggtgaatgctgtggggtggattacttagactctgaataggggtttctatatctgtgatgagggcactattatcagtcttggagaacaactgaaagcatggaatgatgattgtaaagggcttggagcagcaccaaagagcagttgaagtttactagatggcccctgggactgtccagaaacaagtgcagccattgctgcaggatgacatgttgttcagaatgccatggcttatcctgggaaggtcattgtaatttagcattttatataccaatgtgtcgactttcctttttgcaggtaataagccttttgtgtgtgtgtgtgtgtgtgtgtgtgtgtgtgtgtgtgtgtgtgtgtgtgtgtgtgtgtgctgtttgaaaccaggacattctgaatgctatgcaatctactctgaggtacaacccagccctgttaaaccatcttgatacagaatctgtaaaatagaaataaacacccctttcagggtcattctaaggacaagagttgatttcaaacaccattttagcagtggtacataacacacagtagttgttaaaactgatactattatagtgcttctgggagccagtacttaagtgtaatgttcttacacttgtattgactgaaggcagtgtgaagttttcttgttacttgtttgtttgttcttttgaggataatagctcatgtatcccagactggccttgtactggtcatgcagccagggatgatctggaagtcccaacttcctgcctctacctccaaatgttagattacagatgcttgccaccatgttaggtaagagcatcaatttcttgtgtgtgcagaggcctgagttttctgctatgctgaaagaagatgatcacttttgaatatataatacctttttttaagaagatagtgtgtcaaattatgaatgtatattttgtgtgaattggtatgcataaagttatccaagcttgcttctttaagaaaatttcttcatttctttatcagcatcacaccacttacctagtaggtgtttgaagaaacatttgttgtgtgaattaataggtacttctgttgtcatttttttcctaatttttagaaattgtgttttgaaacctgtgttcttggatgatgtgaacaatggagtgtgatgggggaagtccttctgtgtatatgtctctcttattggttaatgaataaagcattcttggccaatagggaagcaagttaggtgagacaaggagaaaaggaggtttctgggaaatataggaaagggtgagttgccatgtgatcccaggaagagcggacacatgccgctggcgtccttggtaagtctttataaaatatatagattagtggttatggttgatacttaagacaaagctagcaaataaaaaatcctagtcattgtcctgcagcattgtattattaatctctgtgtgttatttgggggccctaacgtggtggtggaactcaggcagctggtggaaagagttattattacaggagtgtatataaatgtgtgtggcttcagttggtggaggatgccatgcctagagggtgcagtggtctggactataattataatgtgaacacttactatacttatgatttttattatgacatctttaataagcattgtcttagaggtcaactggagttgcctcagtaaagtaggactaagggctggagagatggctcataggttaagagcatgtgctaagttccctacatccatacagtggttcacaaacatccataacttcaggttcaaggtcttagattccctatcctgggggccaggatagacatggttcacataacaggcaggctaaagacctatacatatagaataaagataactgatttcaaaatagtaataataaaaaagctatgtctagaacagttctgagttcgccttatatttttcttcttagaactttatttagatggcagaaatgtcaggaaaatctagtctcacagaaaactctctgtgatttttctcctctgcctagttgcatagttcggtaaggtcatatctccactgtgttatcctgttaaagttatttgtattggtgattaggaaactagttacatgtgtggtgacttaagtgtttgaaagtggtgttacaattctggtttaaaaaccattcgagtattgaacccccctactcccccccaaaaaagcactggagtgagggctggggagtttgttcagtgggtaaaaaattacagctcaggtgtaaagatccaagttcaagcccccagaactcatgtgaaagccaagtgggaaacataacatctgtaatcccaatactactgcaggaagctaggagacagagacaggagaatgggcagaagttcccaggtcagctagactggcataaacagtaggaaaacaacagagagaccccatcccaaacaaagcacatggcaagaacagacacccaagggtgtcctctgacctccacatacagacataatacctatgctcctgcatcacacacatgaagttgtagcacgagttttaatagatattaataataaaaacctagagtcatatatcaggataaatgctgaaaggtcagagaagtaacggagccagccactagagagacctcttacctctactgaatcctcagaccaaaggggtaaccctgtccttacaaatcctcagactgaatgcaatgagcgcctctctcctcttgccttatattcctctctctgcccagccatatcactcctgtctctacctccctagtactgggattaaaggcatgtgactctcaaatactagggttaaaggtgagccaccactgcctggctctcttttagactgaactcacagaaatccttctgcctctgcctcccaagtgctggaattaaaggtgtgtatcaccactgcctggtgtctatggttaactaatgtgattagctccaccctctgatcttcaggcaagctttatttgttaaatcacgaacaaagtatcaccatatgaagggacacactgacacacacacacacacacacacacacacacacacacacacacactgaactgagctaggtatagtagagtactatatatatatatatatatatatatatatatatatatatatatatatatatacctgcaatccccaaactccaaaggctcaaggtaagcctggactatagagtgatggagtgacactctgtttcaaaaactaaagagaaaaatatgagcctgcactacatagcaagaccctttatcagaaagaaccaacaagccaactagcttttcaaagattcaggctgtaccaagtaagcacatagccataagcaatgcttaacatggcccatcatttttaatcgttcatttgtaaaacaacatgtggttaattcacttgatgaaagaattcagcaaaaactattcttaatgtctgctggcctaaattttttaagttgtgcatttattgaaatacaggagcctgtaacataaaactgaatgttcatttcttccatctggagtaaattgtaaacaacttttgttccagattgctctctctttttttctttcgacatataaaatgaaatctacaggatgtttttcactcagaattatgtcatgagcatttaaaaaaaataaacacacacacacacacacacacacacacacacacacacacacacacacacacacaccactttccttgtgaaatcaagaagagtcagtatgtccagtgttgagcagtcgttggaaaggttacttctcacattcaatagctgtctaattgactgctttcaaaattagttctgattgtggtaattgctcaaaaaacatccaaagaaggcttatttctcagaacacttttatttaaaactgtcttttaaagaacataaggtacactcagtgatcacattattttagcacagtgggttgtgaacaaaacaaaaaatagttgtttaaatgccttatctatgctgaaccaaacacgaagcagcgaaaaccccttgaggtaagtaacaacacaaacgacagcagcagctgggttccctggagcagaagccacatgactgatatgaattgataatgactttatcttactatttgaaaaataggacaactaacttcaaatttctatagttgagttcaacttctccttcacctcctcctgtctgctaggatggattaggtcgccaatctctgaaacagggccactgagatgactaggtagaggcactggttgcccagccccaaggacctgtgtttgactcttggcacatccgtggaagaaggagagaggcaactcttgtaggttgtcctctgaccatgtgcacaatggcatgtgtgcaccaacacacatacataaacgtgtacaaataaataaatgaataaatgcaaacagttttatttagcaaccattgggttaaagctgagtatgacactgtgtgtgtgtgtgtatgcccatgtatgcgtgcatatgcacgcacacacataatagatacgagtgaatcatattttctgcttgtaaaagctgtggtttctaaggtaggcatacttgaagcaacatttataagggtctataagaaaacatggaattttgggggttcttcccatgaacaaatgagaagatactgttgtatggtaagtgctgggtgcagaaataaaggtgttcactgtactcactaacggcagtcaggggactctgctgagggatttccagtgtttcttctcagcaacacacagttattgactttgctaggaaatcctttgtcttttgtctcccagattcagaaagaacagaggctctagctatgagtagaagtttattgaaaacctcaagcaatagtcccattttgggatgagtgtttctgtataagtttttcaatctatttaactgtaggtctatatacccactcaagaaaagtctagcttgtaaaccaaaacacacacaaaaaaccccataaatttaatctttaaactccaattacaaaggcattttctccccctttttattggaagctctaatgttataaaatttgattttgctgaaatatgttttattcattgtatattgaaagctaaagtataaaaatgtagaatggattagtgagatgtaagggaatgtcacttttttatttaaagatgtattttgtcttaaattatgtacttatgtgtgtgtctgtgtatgtgtgtgtggggggggagtgtttgtgcatgcacatgagtgaaggtgccttcagagtgttggagtcccagagctaaaggcagttgtgaactgctcaacaggggttctgagaactgaacgtgggttctctgcaagagcagcaattgcttctgacgcctgagccatcttcagaaatctggatttttaatttattgagaatgatgactgaaagggtgctggccagtcttgatcgacaacttgattagatttggaatcaaagagatccctgagaagatttcctggaagtgggaagcccctccttcagagtagccagcacctctgtgtttccaccataaacaggtctaagggaaacccagctctgcttttctcttgtctgccttcattccttcctcgtgagtggatttactctgctgcctctgaggctgttgaggctgcctttttttcttttctgaggtcagaacctagcttctttggccttcccacctagggtgaagaccagtgatgctacaataatcctctattgccagactgggactcccgaggcatccagcctcatttaactgagaagctactgaattctaagcctttcccatgtacagacagctcctgttggactatacagcccatctcatgtaagcccatattgtaaagtcaaaagaaattatatacagtacatatgtacacctctaaaaatgagtgaaatgagctccttagtacacttcttcatgtgatattaaaatctaaattaggccatcctagttaccattcccttttactttttgctattgggaaaagaaggtcaatagttacccttagatgtgctcaagcaatcaggtgttgttatgttctacgttgatagcgatgtaagtggaactctctggatactcaacctagaaagaactctgtcaggccattttatactcgtgagtgttttttacagtgttggagtcagtgtgcaaaattttcttgtctctaaatttctacccttggaaaacattttgataattcccttaaatgttttttttttttttctgttttgttttagaggactctatattagatctgagaaaactagccagactggatgatgagactgtctttttataaaaggtattagttgcagatcaggcagtattgtttgcacagaaaaaatacatatattcataacagaaaaaaatacaaacccataaataaacaacactaataaacatctcctggcacctgggagattaccaatgtagatgaatgtagcagaggaatgtttgctagcaaataaccttcctcggtgtgtggtggtggtggtggtgaggtggattagtcttttgtttcaagaaataaaaagaaaagtgactcagtatgagcttccactgggcatttcctacactcaactgctgaccttaattctggccatatctgaggaggaggtgattgtttctatgggggagaaatgagaaaggaaaggttagttatttagagcagtgagacaaattttaacctgggcattgtaagactgaatgtgactgctcttacccattgtgttaccttggggcaattctcaacctgcctaggtacgattttttcccattcatggaatgaagatgctagctaaggaagaatgaaaaatggagctaacttgattggcatgctgggtaggttttttggttttttttggcaacttgacacaaactagagttatttgggaagagagaaccccaattgagcaaaggtctccatcagattggcttatttacaagtttatggacattttcttaatatgactattaagagtctagcacactagacagtgccatatatatatctcatagacatatatatatatatatatatatatatatatatatatatatatatatatatcaagatgagcaaaccaccaagagcaaggcacaagcagtatctctccgtggcttcttttatgttcttttaagttcctgtcctgacttcctttatgatgagttgtaagatgaaataaactttgtcaccaagttacttttggtcatgatgttttatcacagcattagaaagcaaactagaacagttgggaatattggcatgaggaaaaatacgtttctattttgttggtggggatggattggaggataacaaaggagaacacttttaaaagaagtgcatcctgaacacatggatacagaatgggagaaaatctttaccagttatcagactgaaggttagcatgtataatatataaagaacttcaaaaattaaacactaaaatagtaaaacttccaatcaacaaatgggctgttgaaatgggcagacggttctccagacaaaaaacacaaaagccaataaatatttttaaaagtctcctcaatcatcaagcacatacaaattaaaactattttaagataccacatcatcctagtcagaatggttttattaagaaaggacaacaacaaattctagcagtgttgtcgggagaaagggacttgttctcactgctggtgagagtataaagcagtccagtcattatagaaatcagtatggaggtttataaaaaaacactaaaattagaactacttcatgacactgcttcatcactcctgggcatatatcctgaggattccataccctatttcagagaaaccttcacattcatgtttattcacagttcaagaaatgtactgtgtacaatatcaagaagcgtgtccccagggagttcacatctgctaatcctacctaaacaatgccaccaatgaggactaagtagtcaaatgcccgagactatcatggacatcttgttcaaatcatcacaacaaggaaagtagaagtctcccttagacagaggcttctttttccaaaaagacattctgaagaataaggaccagaaggcacggagatgaaaaggaccaacaagggaaatggggaggacccaggttccctataaaacatctaagccaagatttgtttaactgacttccacccatgagcccttcccatcccaagggataaagaagctgctctgctttctctggttcttgatcttctgtctttcctggatgatcagttctttatccatctcaaggaataagattggtgatccactagatgacttccagcacctacattacaacatggaagtgtctatgaggggtggaaaggtacaataggaggtggggtaggagagaagaagaggagaggaaaattttgtttgaaaagtgccataataaaatctaatattgtgtacattaatttagaaaattttaaataaaaaagtaagtggataaaagtggttcctctaaatactaaatatcattaaacactttattcaccaactggtgatgaaaatatgatgcatttataccatggagttctcttcagtcctgaaggaaagtgaaatcatgaaatttgcaggaaaatggaagaaactggtaatattacactgagtgaggtaacctaaggccagaaaaacaaatatattttctttctcatatgcggattctatattcaaaattttaaatgtctgtgtctattccaggaatcaacaaaacagtcatgaggtgggcagggaagaggactaaagggaggggttgccatagaaatagagggggaagtatactatggatggaaaggtttagctgaggacaaagacaggtgaggggacagagtcatctaaaactaaggatgtaagacaaatccatataggaacatactactttataaattaactagaaatattgcctccattaagttacaggttattcagtgactgcatcaggcagggaatatttccctataagtcaattgcctggggttcaggctgtcaaaatggcacaagttattgccattgttcctggttgtacaccagaaatagatgttaagacatcactgctgaagacaacacatacaatagaggacacagagaaatcatactggaactgagttggaagttgccacctgttgatccatgttcatagtgccagaggcgctacccaagctgttgggggagaaaagtcatcaccaatctaactcagatgtgacccctgtatgctacaatacctgcaggccaagaaatgctcatggcttcaatagtggtatgactattcctggtgtaaccaactactttttggttggatctcaggcctgtttcctgggagagaatacatgcttagtactgcaaacctgatcaaaggcctgtggatatgaaggtcatgagctgtatgggggactatactattgatgtttccctaaatggaaatgtaggtaagtagtcttctgactgctgttgcactcatccttagttcaagaaatttctctctgcagttgttgatggtcaaaataagaatacactatcaaagtcttgagattaaaggatattgtgtgtatatccatatatgagacatctaccttataaggccaggggaacattgtgaaggagtggtgggaaagaacgagatggaggatgaggatgattctctgggtataaaatggctgctgcaatcgtgaacacacaacaactgtggccccctgccaaagacacacacacacacacacacacacacacacacacacacacacgtgcgcgcgcgtgagcagaggacaagagagtgtaatgggctatgaataacatgagcacaatgcattgtaaaagtaagaaactgtcaaaaaaattaataaaaactaattaaaaattttaaaccaaaaaacagggcttatctaaatgattttatttaatatcctcttgtggcatttagatccaggatgtccagtatcgtagcgtctcaaaactgactcatccaaataagggatactgtaaatataaaatgagagtgtaaacatgtgctatacgaatgtgtgtgtacatgtgtatgcatgagcatgcacctgtgtgtacaagtgtggaggccaggtgaggccatgaagtgctccatcactctgccttattcccttgagacaaagtctctcagcacacccggaacaggctggcaagtgtcattgatcctccaagtgtgatcaactccacatagctttgggattatagctatgcttgacatgcccagctattatgtaggtgctggggatttgaactctgattctaatgcttgtacagcaagtgctcttccctattgaaccatacctttgttcccacattttgaaaacttaatacaaaaatgtaaactatgtccataataattttaaaatattgactgaatgctacaatagcaatactagatatctcaagtctggtaaaaaacccattactaaaattcatttgtggtgtcctaaatttttgagtaaactagaaaattaaagttaaatatgtggcttacattttcccccatttccacctcacagcactagactatcaagtcagaaggatacatttgggaaaatgcttcctgacatgacatgttagttgcacccatgaactgcggctgtggtcacctccataacacttgggtaagattgaacttatcagtatttcatcatggaagagagaggtactcaaaaagttcatctgttgctaagggatattgacagtttggttgctggggacagagaatgtcactttcttcagtggtgtgtctgctgataaactgcccatactctagtaaaataatctccctcccatgctcatgcagggcaccatattgaaattcaaattcagtggatcacacacacacacacacacacacacacacacacacacacacacacacacaccacatgtgcatacaagaagcaagagaagacttgtctggaaagagaagggcttcagaaggagagggaaggggatgagagagtggaatggtagtgttgaaaatgactaaatttattacatgcatgtatgagactaccaagaaattaggaaaaataagataaacaatacagagaggaagggtcttgtagaatgagtgtcagtggaagtcagatattaaccagatataagcaaggaaacaggaataaataaaacacttttggggaaacacgacactatcaagagatgatcatggatttgcacatgacaaaatcagtccaaagggtctgactaccagaaagggccccttgtttatggtggttgattgctttaactgaacaccttctcacattacctgcaattgctttaggcaagaagctagagtgggtgaggagaagaatcgtggaatgattgcaaagcacgctacagactttatattgaccggccttgccaaaggcaggagttagcacaatgcaatcattgtgtcaatcaaggggctgtaactgctttgagaaacttaatggcatttggtaagtagtcactcttctggaaaagttcctttacctcttagagatgaatcatttacttccagaaaacactacacttatgggaagttcggctcaaactgagaattagattctgttacccaagtatggccagatttcatggtggtggctgtgggaaggaggctcagactctatttttatttttttattttattttttgtttttttgagacagggtttctctgtggctttggaggctatcctgaaactaactcttgtagaccaggctggtctcgaactcacagagatctgcctgcctctgcctcccaagtgctgggattaaaggcctgcaccaccaatgccggacatgaggctcagactctaaaaggacattggaaatctccttttcaccctttccaacagctttttgaaggctaactctgctatacctgagagcactgagactgtaagagcctttccagaaccatatcccttctcttgccttccattagtactctagccttttcggagtgcagggtgggctgagtgaaagtttgtagtagaggttaatgaaccgtgcattagaaatcaaatacttgttgaagaaatgagtgaatgaatgcatccactattaatttgtgatttaaatactgacaaacatctggaccagtgaagttgcttccttccacagttgatcactgtgattttccatcgaattaatttttctttcctttgaaaaatttacttataattgacacccagtaattatatatttatggtgtagagtgatgttttggaacatgcacatatagtacaatgatcaagttagaataatgactgcattctttgcctcagaagttgataatttcttggtggtgatgaaaatcaagatcatctttttttttttttttagctatcttgaaacatacaattctattagctataaccaccctacagaacatatatagtggaacatcagacttacttttcctatcagtaaatttgtaccagttggcatatttcttgctctcctctgtctacactactctctctagcctctgtgagttaggcagctttctatcattatgacaataactgaaaaggaagtattttaataaaggaaaagatttattttgccacaggctcaggttcaaagaataaaagaaaaatgatttttggggggctcagggtttcagaagtttcagtccacgctctcttggctctgtctgaagctttcagttgtggctgctcagtatattgtgctgagaacagttgatagaagagaccagtttacttcatggtgtccccaggatcaacaagcaacaaaatagcacaactatgatgactcaactttcttagaccagctttacctgctaagagtgccaccaacatcacaaagggctggggaccaagccttcaactcatgggcctttggagaacattgaaggtctgaccaaaagcatggtagtaacctctgttgtacccctcctgtaattgtcatcttcatgtggcatttgtctgtgattggcttgcttcaattaaggtgatgagctcttgttcctcctgtgttattccaaatgacaggatttcattcctttttaggagtgtcctgttgtatatctgtgactcacttctctcgtccattcatcaggcgatggacactcaggttactgccctgtcttgactattgcaacagtgctgcaatgaacacagccatgcagatgacttcccagcactctgctttctttttccttctaactcaggagttggactgctggctcaaatggtagttcttttttaagttggctaaggaaccttgcatactgtgttccatgctcactgagctcattcacatccaatagtacatgagagtcctttttaacatcctcccagttatgttgttattttatgcctttttgatacagccattctaatcagatttctttgatgattggtggtgatactgaacatttttttccccctacatctgctggttacctcttttgagaaatgtctggtctttcccctctacatttagaggtaagtgggtaaatcctagcaatcaaactttaccatgttcatcgtggtcaagatctgctgtctatggagaggaatgacaaagtgcttcctcatggccaggtctgacctgctgcctgtttagtaaagctgattcaacaaatgactttgaaacatttatgtgtgggaggaaacaatcagaagtgcaatgtcatccgcaggtaagcgccgtgtaaaggttcgtttcagtggcacactgccatgttgattctttcctgtttgactttcagttgtgtagaagttggagttgagaaggggcccataaaacctgagactttactttctttagtccttcataaagacgtgccactttctactttagatgcagatgtgaagcattaatctaatcttaatcaataaaaaatcgaccgggcgttggtggcgcacgcctttaatcccagccctcgggaggcagaggcaggcggatctctgtgagttcaagaccagcttggtctacaagagctagttccaggacagcctccaaagctacagagaaaccctgtctcaaaaaaccaaaaaaaaaaaaaaaaaatgggagccaaatattggaataagaacctgaaagatcagagaacagagagcagcccccagttgcttcctacctcttcagttcctctgtccagaagagccgagattgtctctcagcccagccttatcacttcctgtctcctctctggctacagtccttcctgtctcctctctggctacagtcctccaaacctctatggtcagctagtggctaactccactcctttgactctaaacaagctttgtttgtcagaacacaattaaaataccacacaacacagacgtacttttgagggggttcataaggctcacttattaagacatttgaaagctagagaagtcttctgagtagacaaattcctatttttgtaacatcttgaaaactatactggtagcacattttcttttctctttcattacctcagctcagtgataaagcctacagaatttttcatttgtttgcttgttgctgttttctgaaaacacactagtacaggaccttgcatgttagaatcactcagctccacttataccaagtctaacagggcaacttggacctttctggcttcccaaggttccctccaggctcttgcctgacctatggtcacatgctaggaaggcaagtttcagaacacaatttaagacaaagatttggtattggggtcattggaaagcctgagaaaaactgaaagctatgcatacatctaggtatataaaagtttgaatttttgtttatattttaattttcatgagtttcatttttctctgggagaaatatttattttcctgataccaaggctggcacactaggaagaagacagttccattactgtcattttcaaacaaatttctgtcatgagaactatagagtgttctcacaggcatgtatccctattttatacttgttttttttctttctttctctcttcctttctctctctctctctctttctttcttcctttctttcttttttttgaaacagtcttgctctgtatcctagattggtctggaatttcctgtgtagatcattattgcctgaagcccatagtgaccttcctatatgggcctggctttgaattattacaatttcagaatctattttaacattgtactatctattgttttccacagaaagagatccaacttctaaatttctataataaaaattttagccaagcatggtggctcatgcctgcaatcccagcacttggaatcctgaaacaggaggactggcacgtgttcatgctctgcataggctgtgtagtatgagacaagcctggacaacacagcaagatttagcctcaaaaccacagaggctggaaatttccatagaagatcctgtagttttgtatccatgtatacaatggcagtctgaaggcagagatcctttctaaattgttatttattttacgcatatgaatgttcagcatggaaatacttgggagttacagtggtttgcaagccactatagaggtgctaggaatagtgcccaggttctccacagttgcagcaagtgctgtttaccactgagccatcacttcagccctgagatccttttactttaggggatcccagactttctcttaagtctttcacctgattggacaaggtcctcttacatgattgaaagtaaccttcattattcagagtctactgatttatgtgttaagtgcacatacagcatatataacatctttctctttcatcaattctgctaatttagtcttacatttgctctctctctctctctctctctctctctctctctctctctctctttctctctttctctctctctgtgtgtgtgtgcacatggaggtctgttgtgtgatactattcttatggatatgtgaataaacatttattcactccagataaggaaccaataacagaccaaagtaaggataccactaaaattcaacttgatgaaccaaagagttttattagagtcacttacaggagtatgggtgagggttacttacaggagcagaaatggctcaaagaaagctccatccccaagagcccacctggattgaaagctcaaacccaggaagttactgtatgacttgatcaacagctttgctagtgtttcttccaaggcagcttggctggtctgtgcctgttcaaggcacttcaacttgtctgaaagtgtcagcactccttcctgcttatgtaagcttgaggaaagagggtcctagtctatctggtcagtttcagggacttcctgaaatttttgagtcatttacttttgtagcttcagaagatgccccacgggatgtgtttctctttagaacacaaggttttccccaagtaagaatgttgttatgcaataagatcagaggacatcttatgaattttaggccagctttgtctatatagaaatttccagtccagctagagctatatagtgagaccctgtctagaaacaacagcagcagcagcaacaacaaataaacaaaaatcccaagcaaaaaaaaaaaaacctgttaaaattcataggaatttaaagcacattggagcattatatctgactccttactttctcttccagtttaacacccttgtccagaccacaatcttccaattgtggaagatatgctattgttacaggaaatcaaacaaaaacccagcacctaaggaacccatgacctagcctgaaaacctgtgaatatgatatcttaacaggcaaacctgtgaatatgatatcttaacaggcaagttgctcatgaactgatcttaaagtagggacagggctctgggttatccatctgggctcattgtaattagaaatctttaaatgtggaagtaggggccaggcgacattggagatagtaaggcataaagtaaactgaatggtgtacccacccttgccaagctcatgggtaaaagtcccaacactgtatgacatttagagatggtggggggggtctgtcttaaggtttctattgctgtgaagatacaccacagccatgggaattcttataaggaagcatttaattggggctggcttacagttcagaggtttagtccactaccatcatggtgggaagcatggtggtgcccaggcagatatggtgctggagaagtagctgagagtcttacatcttacaggcagcagggaatgctctgtctcaccgggagtagcttgaactaggagacctcaaagtcctctcccacagtgatacacttcctctagcaaggccacacctattccaacacagccagtcctcctaatagtgccactccctgtgatcctatggggactattttcattcaaaccactgcagggtctttgaagggcaattagagtcagaggagctcatggggtgggagactcttatgctgctatgaatagtgccttttcaaggcactaatgtacaaggacagtgcaagagaggccatcttcaagccagagagtgtgtctgatcacaacctgaccatgctcattcttgatcttagatacccagcctctgggcctgtaggaagtaaaaccctgtgtttaagtcacctatttggggtagaagaccaaagttgactaagatgagaaatgaaaaagacttctctaaagttattggcttttaacacaaggaagtaaccatgagctgatgaaagtaggcaccctcatgcctttctaccagaaaggcatgcaaacccaccgataccttgatttcagactaggagacaagccctgttttgtgactgagagaccagaaaataatacggatttgctattttaggccacaaagagtatagtagtttgttatagcagcagaacaaacatatataggtactaagtgtaagacccccgagagggaagatcctcactcaagtctcgggatgacgctacccccacgaactcacgagagactgtccttgctgcaatcgcacgaggtttattgacaggaaccagctcgctggggccggggctcatatcccatgcaggggtagaggagtttcgaccctgaatggctgggaataggggtttttaaaggaagaaaccacaacccaaaataccaagaataccagtgagggaagaaaccccaacccaaaataccaagaataccagtgaaaggtcctgagggaaatcacaaggggaaactccctattccttaagattgtttgtaagattctaatctaactttttatgactagccttttcctggagcagagttgctgaaccagctagccaccctatatcctaggccttattttgtctgctgagggggtcttctttatcctggcatttcataagcaaaggatgaagaggactgagcacttaatatttcaaccaatgcaaatctattagagttcaaactatatttattaaaaatagaaagagcacaacagctgccaagcaaggctggcactgttagggggaatgtcacacttgtgggagagaatgttccagccccttcaaaagactgttagcacacctttgacatagttcttgttatttcactaaactgtttggagaaacttgcaaggaatcagctaagattcccaagccacactgactcactccttcaggcaacccaaaagaaactgccttttataatactaaactgagcatgccctggagtggttcatgtcttctacctcccttttccttttctgagtctggatttcatcatatggttgtagcccaggatggtctggtactcaatatgtagactagtctggcttcaacatagagtcactgttgttacttcagcctctccggtgatgggattataggatatgccaccacatctgcctcacaattcatttttgatcaagagcactagaccttgaaccaaacatgcccagaaacatcagcatctgccaccttttcttttgaacacatgtccttaaattgaatgtgttcagaatgtatcagggagaatagtgctgtccatatgatcactgtgctcccctctgctgcagtactcatgctcagctctccccttctggctgtgctatggctttgcacttaccaaagtgtgaaactattgcatttggctatgtgaggaagaatgcatttttttttctagcaaatactttatacaaaatagcaaaggctgtaattatccctccttgcctcatgttgtttgtatcaatccaaggcatttattttaaaaactatagtttggtattatgaaatatttataaggaggaaattaagattttatttgcaattaatttctatatttacattccagagcaatgatttagttattattatcttgacataactaaccatttaaaagtttatctttgcctagcttctcaaaacagtaagtaatttcatgactttcctatttagtaatactataacaaccatgcccttattttattctatttaaaatataacttatcttatttttttttctaaataacctgggaaatagggattctggtttagcaatgaagagggtgtagtacattgttcagtgtggtagagctggcagtctgaatccaggcaagttgactcttgagacagtgactttaaccattgccctcactgctacacacaaagtgactaaaccatactcttaattgtagacatatcatgaaataaagtaaaaaagataagtagaattttaaaaagagggctatctatttccttctgtttatctatgtatgtattcatcttcccacccatccacctacctatccacccatctatctgctcattctttttttttttttttttcaggggttgggggatctggtttgaggaagaaaatttccagtcaagtaagctgagtttaaagtcatcaaaagaatgaaagccttcttttccttctgtaatttcttagtagaaaggtaatccttaaatgattttcttatccatgttctttcttattatcaagaatagaagagaaatcccaaaccatcatattgaactctgagtgttgaccataggcttttgagttgcccaacaggaatagtacaggacaatgggaagtctgctaaaggagaaggtttgtgatttcagaccttcccacttatgtaaaattgagtccctttaccctaagttttctcatctggaaaataaacagacctttcctggactgctttgaggaagagaaaaagcattctcagagtacatggatagtgtagctgctccacagtgttaggaatatgttttcctcttttctctgcaccctcttccaaaatcgtgttgttctgtgtactagacacagagctggcacttactggattggtgggttagaacagctttctttctttctttctttttgacattttcttttttttatcatttttaaatttgaattagaaacaagactgttttacatgacaatcccagttcccttctccctcccttccttccctaccaccccccccactaaaaccctacctatcacatgtcctttcttctattcttcacctgactcaacctttctgctccctcatgacctctgcatccttcctcttcttcccttctcattctcgtagctccctcccccctcttcccatgctctcaatttgctcaggggatggtgaccctttccccttcttcaggggacaatgtttgtctcttttagggtcctccttgtttaccagtttctctggcagtgtggattgtaggctggtaatcctttatgtctaaaatccacatatgagtgagaacatatcatgcttgtctgtttgtgactgggttacctcgctcagaatggtttcttctagttccttccattttcctgcaaatttcaagattctattttcttttttctgtagaacagcacctgcatttctttaatgtatagaacaggggacagatatattggctttgattatcgagtagtgttcctacccatctctatttccttattatctttttgttccaacactagaagactctatctctatgagcttgaagactaaatcactattcagctaagaataggatgctaatgaagagcttggaggatggaggtgtggcatagtggtagagcactcaatttcatgtataattactagcaatacatgtagtctcattgagactatgggctttttcttttttctttttcatttttgtttcttgttggttttcttttgagacaggttctcactctgtagcctgggttattcccaaactcatagcagttcttgtctcccaattgcttcaattacaggagtgaaccagcaggtttaacttgtttttattggtgacttttctagagctgtgttaaaaccctggaactaaggtagcttatagaaggaagagttatgtcaggcttatggttctagaggcatagggtctacaatgttggggatagctggtggcagacaaggaggctggagctagaaactgaaagctcacatctagaaagaaccacaaaacgtggaacagagaacacacctgaaatgatgccagtctttcctcaactttccagtgtcttcctgaacaggactaccaagcactcaaatgacctcattcaaactgccatgtcattgtcttattttggttgagacagagtctcgctgtgtagcactggctggcctgtaacttactgtgtagaccagcctggcctctcaaactcacagaggtctgcctctctttgcctcttgagtactgggattaaaggtatgttccatttttctttgcttaaaatgtgtgcatgtgtgcgtgcatgtgtgtatgtgccttagagcgcacagtgtgtgtgtgtgtgtgtgtgtgtgtgtgtgtgtgtgtgtgtgactgaatgtatgtatatatgtgtaccacatgcctacagaagccagagaagatcagaagagagcattgggtccctttgaactggtggttgtgaatctccatatggttgctgggttttctgcaagagcaacacaagttcttaaaccatggatttgactctctagctcactattattaactttacatttcttatgatctcagacaatttcttgaaactcacaaatgagctggacttggtgttgaatgtttgtaattccagctccttggagagggagacagaagtgtcaagagttggagaacagcctgggcgtcacagcaagaccctatctatctcaacaaaaggaaaccaaaacaggtgaacaaaacccaccaaaacttatgaatagcttgtcacttcttttagaacagtctaaacagccttccctcatgtcctatcagtgactcaaacctcatctgaaactcccctctctctcacattggccttctcccagtgttgtacaatgtaccagcaagttcttgtccatgacatagtctgtgccatgagaataactttcatttcctccttcatctctatccaactgctcagtcatccaatctttccctgctagtaaattgctttggggaaaagtctgttttcctcattgtcatctatctagcttgatcagtgaccatgccttcaacacttgactactgttcagttgattactgtcatttgtgacacttttctcaaattaaatctttacttgtgtaattatttgcctaaaatccattcccttgatagattataaatcttgttctatggttctcagtacatgcttgttacatgattcgctccataggtgtgtattgaatagatccaggcaggcttaggcactgatgaaactgagacctgtggaggctatgtaaaaggtggcactcatggtgacagccagtgatgacagcaggcaagcatagagaatgatttagcgactgagactctacttgtttggggttatgtacctctttctctttaataatacacttggcagccttgctactgtacctgcaaatatgatgctcacacattgccctccaaacaatattcctggcaaccccagacccctccctgcagtgggctacacatgcacttctctctgagcaataaaataagttcctcctccctttgatgaccattagatttggacaggttctattcaaaggcattttcagtctatcctgattgaagagtaacagggctgatttggtttgagctagttttgagtatctggtagtaaggcaaaaccaatccaattgaacttgttgagaaaaccttctattccatatccacagtctgtattcaagtccttgcacctctctggatacaacaacatagcattggggtatgtgggagggagttgagggtgagagcctttactgctagttcctgctgaccccagtggaagccatggcaaggataaggcctccaacctgcattatcacacttcagccctgcactctatggcatgcttgggagcccagcttatctccatggtatatccatctggtccttggtagaatgctcttctattttctaggacctgtcatgtatgggagcgggagggtataatccattgtgcagtggttcttactgactcaacatgaagtgcccttacccccatgctggggctgaatttctactttagcatctttaatttcagggtttcacctccaccaaggtgtatagttctcagtcggtcaacccaactgcttctactgtgtgtgtgtgtgtgtgtgtgtgtgtgtgtgtgtgtgtgtgtgtgtgttgggcaatactgccctggaaatttcaactgatcttggctagagaaccttgtgcaaagtagaataccagatcaccagatcaacctcctatttttttgagcagggggtagtggaaatactgagtacaaggctgtggctagcatctactctcatagagctgaaccaaatgctcatagagttttaagtatgttgaatgcactatctaatctaattcagtcccccattgcctttaagttcccattgaaatcctaagcttaggctcctcagatgtgactgtaaaagcagctatccctatatggggtgcgcagccacaacgtctagcaggcaaataacaaagaaaaacaaacaaatgagcaaacaaataaaaaaaaaaacaattaatcgtgtcgatagtaaccatatacagatttcccccttcattattattctctttttcttttatttttcagtcctggagtgcaagccagagcctgggatttctgggtagcatggtaaattagaagccccactgatgtggatgcaatagtgaaagaaaataggaaaatacacagtgatatctatcccaggaggagacaatagctgtaaacacatttatttagtaagccgggtgaaatctctgccgggaagcaggcaggggaactgagatgggagaaaataaaggttgtaatcagagaaggttccagggagtggagagagagaaatagtttgggaagcaggtagttgcagactttctttaaggggctgaagtgggatctagagagatgattcagtagttaagagcactaactgttcttccaaaggacctgggttctgtttccagcacccccatggtggctcatgactatctgtaactttatcctaggatctgataacctctttcggtttccatgaacaccatacactttttgtggtgtacagacacacatgtcagcaaagcatccatatatatgtatgggactcaaatgctcaccaccaatggactgtggcagaatcactcggaggcagtctgagcagctggaactgcatgtgcagtacttttccttatcttggtttgtgagcaaagcctgaggtcaaaggtgatttgcagtgcctggtgtcctgcatggggaggatcccccacaggaagtctaaagttatataagtgtgaatgagacccattccttacattatctgctttctaggctgaggatctggagggccagggttggagatatgtgttaacaggggccctgtgaattcattgtgcattgagctaaggtgtttacaaatgaacattcaagatacagttgcctttttaagtacagaacaaagtgagctaactcagattatagagtaacattatagcctctatgtagatatgacaaaatcttaaaaatgatatgtaaattactaaagtttagaaatgctgatataaaggaatcaaacaaatctggctaggattcagaattgtgacactagtgacaaccatagtagttttaagatttctactttcttgatgggaaaatgggaaaaccattaccaaatctgcttgtctctgtcttgtcatgaattcattgagtctcatttggtttttcacccagtggaagatatttattatgttctatatgttagatttaaaaaaatgttctgtagagttaaaatgagatgtttctgggaagagaaatttacttctgcaatttttgtgcaatgacctggtatttcactttaaactctcaataatgacattcatttcaaaagatcataagagtgggtttatgttaaagtaagacatttctctaatgaatacaaaaatcaaatgtgtgttagtaaatgagggtgttatgattagaaggtgctatttttcatttcacaactagaacacacagaggatccacgtttagccctatcttcttttcacacgggcttggggatctcatgctactctgctaagtgaaagtagagatggtgagatccttcctggaggagctcagagcaaatgtgtgcagcacagtaggagagagcctactgagctgctgtgatagaaaaggtcaggcaagtgctctgtgctgagagtgtaggcaatgagctgtttgagaccaggaggtttgggtcaggggacggaggaggaaggacaccactcagatttctcagctagatgaaataatagatgtgggttaagaggggacacagaggtgagccaaagtcaccaaaaaaaaaaaaaaatgcctcaaaaaagaatttgttagacatggtttcctctgtgttttattgttttaaagaaacctgtctaaatctgtttgtgtccttataataaaatgcataaagctaggtaatccataaggaatgggaatctactcttctgattgtgggagccaggaagtccaatgtcagggtagtgtcaggaaccagcacctgaggtttctggtgaagccttgctacatccataggacggaagcaccaagggcagagagaaggctgcgtcctcctgtgacagaagagagaaacacatgaaagggcacagctttctcctcctgcctttctcaaaggtcaccgatcctttcatgtgggctctgcttgcatgatttaatcatctcttaaagggcccgttttttaatgctatcacatggattcagttctaatgtattagttatggagcgacatacatattcaacccatggcctgcatgtgaaagcttggcttctcagcctgctcccaaggaatacatacttctgtgtgtcccactaatatttgaagagtggacaatggggtacacttgcaggggctttggtcagcttgatggctgagcctaactcaatggggaactttgtaggacaattcatcagtgatgctttgaaggcaaaggtttcaaatcctcgtgattcttcagctaattggccatgtaaccctgtatgctaacagggcagccacagtgggccctttgtcttttcctaaccaacacttcctatagatgtgtgtttgtcctgctgggctagagttgactcttcaatcctagcagtgtcccttccagtatggctgtggctagcctctctgctcttcttctttaagtcatagtaattgtaacaactaatactgtccattatctgccaccccactgctttgtgatgttaagaaccctccacatgcaatataccactgatttctcaggacaagcttatgagaaaaatccaactcagattacagatggagacacttgaaaagggtaatgattcagtaaatgttactcagctaaaagaggtaagactgagactgagttcaaggtttctggttttgtccttttatcttacactgttgctgcccaggaggccgtactgaagctggatgtggggaggtgggaatcacgggattgtgtctgacaagcatcctcctctcttacccttctctcagaaacagagagcctgccctgaatgtcatctctgataagttgtcactttgctttttctcagacaccatgagtggccttcaatgtggtgacacatgaggcagctcagaccatgtctcgacagctctgatcatcacccggttttcccacattttcagtggaaatgatttctctctgtaacttcacctacttggccgtatcccgttgtttggatcttgaccaaaaaatgggcttttcttctttcttatggacaagtctgtacattgggcactactcgagtgcacttgaaacagtttcctgccacagcccaaactccttttcatacttagagcaaagccaagccccattctgcccacgatagtcctttgctttcattcctgtgagcagctcattacctgtgcctattagcccagaatggcatgcttgtgcaaatgaaagcctagctttgtttcagagtttatttcatggacagagtaaacacatttctgagcagcagcctttgtttttctatttgacctcagtgattcaggactctggcatcatgcctggtcctcttgagaccctggtgttaaactactaaagctgataatttatatatttataacttagaagcaagagtacatataattaaaaaaaacatacttttgtcaatatggaggactaaaattttgagaaaaatggtgagttagttgtgataggtagtgtagttaacttgacagaatctagaatcacccaggagatcggcctctctggtcatgcctgctacaaataaccttgattatgctataactgatgtgggaagacacatcctaacagtgtgaaggctattccctcagcaaggaatcctggacgacataaaatgaaaacaacaagctaagcactaacatgtattcattgctctcttctcctgactgtggacacaatgtggccagctgcttcgagctcccattgcctcaacatcctcaccatgctaggctgtacctgagttattgaaattaactgcttttgtcagggtatttaattatagcaactgaaaagaaccttggtgtgagtccagaggaagacagaattatgagagactatcaaggtcaactttgtattttttctttaaccttgttttaggagggtgtggtgatttgaatgagaatatcccccataggctcctcttgtatttgaatgcttggttcccagttgatagaactgtttgggaagaattaggaggtgtggtcttgttggctgagatgtatcactgggggtaggccttgtgatttcaaaagctcacaccattccaagttagttctctttccctccctctctctgcttcctatttgtggagaaggatataaatcttcttatatccttgcctatatacaacctatttataaccatgcctacttagctgttgccatgcttcctaccatgatgatcatggactcattctctaaaactgtagcaagcccattataaacaaaagaaaaaaaaaaaaaacctttcataagttaccttggccgtaatgtctctcacattagaaaagtaactgaggcagaggggtaaagattacagactgtattgcaatgataaatttttctgacacagccaccccagccctgctgccatgtggatactgctagccaggccgcccaagttctgcctgacaccacgttaaggtcccaagtaacacacagagacttgtatcaggtacaaatgctgcttggccaactgactaggatttcttacttgctagctcagtcttaagtatcaaccataaagacttatcttattggatgccagctgctggcatcttctcttcctgggatcacatggcagctccagagcagagagcaggaggaagagaaaaaggaacaacttccttctttcccatgcttatatatgagtctgcctgctatgtcacttcctgcctgtaaaacaagacttctttttactacatttcccagaatcctccttgactcctagtctctcctaacctgcttcttcactggccaacagtactttattcaacaaccatttaggtaaacatacacagagaaggacattccccatcactgtatgataaaaatgataattgcattaccttatgtgcactaggcaagacttctaccattgagtacatgcccaccctctcttttctttgtatttttatagaccgaattatggtttcatttctagtactgtgataaaaacatcccaacaaaagcaattttgatggagaaagggtttatttgaccacaattccaggttattagccaccattttagggatgtcaaggcaggcacttgaagcagctagtcatatccacaacgcagagagggagtatgaatgcatactgctcagttcagtttttcttcccttatccaaatctggacccaaacccaggcaaggtttctatccacttttaaggctggatcctcaattaccataatcaagacaatccccacagacatgcctaaaggccaacctgatcgagacaatgtcccatcaacatttttcttccaggtggttctaaattgtgtcaagatgacaattaaaattaaccattatagataagatagaatcttactaagttgtcaagaggatcttgaacttaagatgtagtctaggaaggctttaacttgagaccctcctccctctgtcttccaagtagctgatattacaggcatgagccatcacatcaggcttggcaaaaaatttcatgttgttagattaagcacaatagttatgaacttaatggtcaatatttgaatttatgatagaaatttccaagaggctaaagaacttttctgttttaataaaattcttgaaatttgtaaagaacactctatgttgttgctggggctgactctgtttggaagagtgtttctcctgtccctctgcttggctccaccactgtgactgggaaggtgacttggcctaacttataggatactagtaggtcacatcaatgtatgaaaaattctcctttgggggcctcaatttccttatgtggcatgcgataaaattttactaagtttcctttctatacaacttactaaggttcccttcaattctgaaaaaaacaaaacaaaacagaacaaaacaaaaaactgaaaagttcttccttcatctaaaaagcactttatatttgaaactaccatatcatgatatagtttctcccttgcctttcctccttccaacccatcccacacttgagcatctagccttttgctctctttcaaattaatggtttctttttctttgtttattctctcctaaatacatgaatataacctgatcagtctgtacaatgttacacatgtgtatgttttcagggctggtcatttggcattggataactgtaggggaagctgtagccacgccttcttaggggctggctacaagagtacctgagggcttgtgagggcgtggtcagagtgagtagggggactgcgttttcggtttcggtttctctttgcttcttgctgtacagactaccaccggctggctggttcgctctgtaagtaaggcttttccctattaaatacccttatatttctacctgactccgtactggtaatttactatatctggttgtcagaagcgggatattggaaacccacaccccatttgggacaggctgtgggttccatcgggcccgccgcctaggcccggaaagcaccttctttccacaggcattcccggctagcagctgacccactgcagctgtgctgctcagtcatccacccagtttctagctgcctagagataagcgcaggtgcttttgtgaccgctctccactgctgaccgactgctgccaaatgcctcggaataactgaaggcctgtgctacctgctggtcaaatatatttactgcatctggagtagaaatcaggtaaaatcatggcggaatatttatcatttgctgaaattggtaatgtttttgcttattacgtgaattcactgtttgaggaggatgctaatttgccaattattggcctatatgctgtcatggcagttagcttgctggtacaaatagtattactagccagaggactcaggaatagagataaggataacctcaccacctgcttacaggaaataacagctttacgattaggtcagaccacaattgtgcagcaaatggaacagaaattggatgataagcttggctctgtgtccaatacactaaagacagagctgtctgatgagatacagcgtatttatgataagataaacacagagagatcctccatgtctgaggccttagaggctaggctgtcagaagaccatgaccagctaaagaatatctgtagccagctagaaactcagataggcaatgttactcatcaactagatgcaacggtgcaaaatacccagcatagggttgaagaattggacaatgccattcaatcagtcattgaagcatccaaggtagcagatcagaaatttgagtctagatttgaatgtttggaagataatttacagtacagggctgacagattacataggtccatacggtcgattgctgaggactcaaaatcagcaaatcatgacctggaatctagactccaatacctagaaggcagtttccatgccatccagatgctgtctaaggatgatcgtatgaaagacctagaaaaacgtgtagatgagcagttagagcaatttacagattcactaacgtgcttggaatcttttatgattaaggagattgaaacttttcaaaaggatatcattgctaggcttaaagatcagtgggatgcctcagaagcagaatcactccaatcccaggcacctactccacccaggtatcgtgactattcttctaaggttgttactcgtacaccattagtgtacccagctaccatggtagaaaagccagcttctaagaaacaccctcatggacgaatggtttatgaatggcaacctatacagccgaaggatcttaagaatattaaagaatcagttgtctcatatggtctccatagcccatacgtaaaacagctattacattcatgggcaacctttaacagggtgacacccacagattgggaacgattggtagcagctgtacttgagaattcatgccaaatccagtggaaggcattggtaagggaagaggcaaagctccttgaacgtcagggcataaaggaaggttttgaagcgcctctagataagcttcttggtcagggtatttatgctgacccacaggttcaggctgaatatgatgacgatatactgtctctttgcaggaaagcagcattaaatgcctgggataaggttcgtgagccaggagaacgtctagaagcttataccagaatagaacagggacctacagaacagttccaggacttcttacaaaggttaactagggcagtagaattacaggtaacagatccagaaacaagacaatcaattatatatacaatagcttatgaaaatgcaaaccctatatgcaaaagaatacttttgcctttaaagatcagatcagctccgttagaagaatgggttttgtatgcagccaacattgactataatgtgcaagatactggagcttgggtaggagaagccatctccaaaggtttaaaacggcaacaggaaattaaaagttctagaggtgaggatgtaagggcttggcaaggagaagcaccttacagaggtcaacatagataccaagaggctagaggttactactactatgaaccagaaccttgggtaggaagagccttcccctggagaccacgaaggctccaggaacctagatgtttcaactgtggtaaaatgggacatactaagagaaattgtagacaaatgaattctaacaatgcctcatatggaaggccactgccttctggattgtgtagaagatgtggtaagggcagacactggaccaatgaatgtagatcgaccagggacatacaaggaaaccccttaaggtcgggaaaccccgaggggggcctcaagaaggcccccacatcgagaaaggtcaggtcatttccaatagcagtggaagacaatctctcacaggaacaatagacagttctttgcatattgtgaaaaaagatattgctctagatggtagtttgaatagtgatgaagaatcaagtgtgaatggacaaaatgagaaacgcatattttggcaagcttctattaatgataaaaggcctcagttaaaagttaaaattaataataaagttatttctggcttagtggacactggggcggatgtaactattattactcaaaagtcttggcctcagaaatggcctcttagagaggcaaatgtacaatttttaggaattggaactctatctagagttcgacagagtgttaactcagtggtctgcattggaccggaaggacagaaagggatactgaaaccatacgtggcagatatagctataaatctctggggtcgtgatctcttacagcaatggaatactcagattaatattcctccagtgtcagatacaaattatgaaaaagatctggtaagacgctatggaaaacggttaccaaccatccatgctgtacagaaactaggtacaaatgatggaccttcagaggagccaaaggccctgccattgaagtggcttacagatgaaccagtttgggtaggacaatggcctatgacctctgagaagctagaggctttagaaaagttagtacaggaacagctagatgctggacacatagaggaatctaccagtccttggaattctcctgtctttgtcatcaaaaagaagtcaggtaagtggagaatgctgacagacctgagagctataaataaggtaattcaaccaatgggctctctgcaacctggaatgccattaccttccttaatacctaaaggatggcctatcatagtcattgatctaaaagactgttttttcacaataccgttacaggaaaatgatagagaaaaatttgcatttactgtaccaactcttaataattcacagccagttaggagatatcaatggagggttttgccacaaggaatgctaaatagccctactttgtgtcaacactttgtacagcaacctttgggaataattcgtaagaaatttccacaatctcttgtttatcattacatggatgatattcttttatcagattctaataaggaaactttggaacgtatgtttgaaatggtgaaggaagttctgcctcgttggggattacagattgcaccagaaaagatacaaagaggaaattctattaactatttaggttacaagatagacttacagagaatcagacctcaaaaggtacaaattaggagagatcggtatcaaactcttaattctcttcagaaattattaggggaaatttctcaattacagacaattattggtgtagaaggacatgacttaaagcatttaaaaatggcccttaaaggtgataaggacctaaacagtcctagaatattatctgatgaggcagaaaaagagttacaatgggtagaaaacagaatattgaatgcacatgtagatcggataaaccttaatttagactgtattctggttatcttgccatccagagaatacccttctggaattctgatgcagagggaagacactatattggaatggatatttctgccacataaacagaataaaaagttaaagacatatatagaaaagatttctgatttgattttaaagggtaaattaagacttcgccagctgactggaaaagatccagcagaaattatagtacctttaactaatgaagaaatttcttccttatggaaagataatgaatattggcaaatagctcttactgactttttgggaacaattagcaacaactatcccaaaactgacagaattaaattcataaaaaagacagtctggattcttccacgtattgtaagacaaactcccatttctggagttcttaccttctacactgatgccaacaaatcaggtaaggcaggttataaagcaggtgaggtaagtaaagtagttcaaagtccatatacatctgtacagaaggcagaattatatgcaattctcatggtacttaaggattttacagaacctcttaatatagttactgattctcagtatgcagagagagtcgtgttacatattgagactgcagaatttgttcctgataatacagaattaacttctctgtttttacaattacaggaaactatcagaaacagaagtaatcctatgtatattacacatatcagatcccatacgggtctgcctggcccactagcacaaggcaatgatgagattgatcgtttattaattggaagtgtgctagaagcctcagaatttcataagaaacatcatgtaaatagcaaaggtttgaaaaaggacttctctatcacttggcaacaagcaaaggagatagtgaaaaactgtcctacttgttccttttataatcaaactccattgccagcaggttgtaatcctaagggcattcggagaaatgaggtttggcagatggatgtctttcactttgcagagtttggaaatttgaaatatgtgcatcataccatagacacattctcagggttccaatgggctactgctcttaactctgaaaaagctgattctgttattatacacctgctagaggtgatggcagttatgggtatacctgcacaaataaaaactgacaatgctccagcatatgtctctacgaaattggaacaatttttcaaatattataacataaagcatgttactggtataccacacaatcctacaggacaagcagtggttgagagatctaatagaacacttaaggagatgctcaacaaacaagcttggaagactaaaccccccaaacataggttgcataatgctttattaacactaaactttcttaatgccaatgaaaaaggacaaacagctgcagaaagacactggactacggaaaaaactgctgaactcaatcagccagtatacttcaaagatgtactaacctctgcatggaaaccaggacatgtattacgttggggtaggggttttgcattggtttctacaggagaagaaaaactttggataccatcaaagttgatcaagattcgactggaaaaggaaaaacctctcgacaaggacaaatgacaggtattctactaaggtatatcttataaactaaatagaaacctcccaaaggaaagggaagtgttttgcttttatcttcacaggaaaactcatcttcagaaggcaaaagacactgcatgggtagatacttaagaagaaaaggtagctataaccatcaaatagaaggaatgtgccatacggtaaactttacagctgtctctcaaaaaactctatttctctttatttcctagtccctattcaattaaaccaatgctggacttagaggtggatttggctttcctcctctaaaatccaagcacattatttaactaagctttagtgtttctgtgttgtatcaagaagccaattgatgtaatacagaataaaagaagaatttggggactgtctttgtcttttcttggatctttctctcaaggtgtacaccctttcataattgttatgctctcatggttgcattccctagcatgtgtacatacacaagcaaacatttctctgctaactgtttatgtttgagtcccacacagccaatgaagacctgcctgacagcaatccctggacaccctggaaagaaaatgggccacagctcctcgactgcactggatccaacttgctccatttcagctgacactccggccagaggttcgggtactgacttcaatcaagttgaggatttcaagcgagatcttcaatcaagtgaatcccatctaacatggactggatactaacattttctttctacaggaccccacatgactatcatcgtcccatttcagcaggaagtaacttggaaaatgctacgccccctttccccattgttgtcacttaggatagtgtatatacctagttaggaatagcttcctattgtttatgactttagggtttagttaaaatagatagttatcttcttatattttacctttatactgttaagttttaatcctcttttagactaaaaggggaattgtaggggaagctgtagccacgccttcttaggggctggctacaagagtacctgagggcttgtgagggcgtggtcagagtgagtagggggactgcgttttcggtttcggtttctctttgcttcttgctgtacagactaccaccggctggctggttcgctctgtaagtaaggcttttccctattaaatacccttatatttctacctgactccgtactggtaatttactatagataaccaattggtgtgctctttcctggggaagactttttctccttctctctgcatttcttagttggctgtagttcttggtctaaggttgagctctcctgagtcccccctccctttcattagcatatctgttggtgttgtctttgttcagttcttgcctttctccttattttggtgtggtagtttcctgccatgtagtggctttatgttgacataagtgacatgttttccttcgacagccatggtgcttccattctttattcccttgaacaatattatacatgcatatctttgtcatcccagagggtgagaaaaatatatttaggctccagtgtatgaccaacttggaccagtgaatgggtcattagttaaagcttaatatgtgcttaggtactggcccaagaagatgatcagaaccagacctatatacaactcaaaattatgagcccatccagcataagttaaacacccagtaagtgcatgaatgaaaaacaaatgatttattgttttgatgttgaaaatgtgtagttgtttttcaaggttaattagtcatgagattagacatgtcaaatttataacctgacctaaatttttgttttcagtggacttgatgcatactttcacttcaaattttgttaaatatttatctaccttcaatgttctacttatattctattcatattttatttgtatgcgtcacaatcaaggcctcgatatccccattccccctttgaggcagagtcttgccatgtggcccagaatccttttgtagtcttcagaatgatgggataagatgcacatactccgataccctggataaagccttaatctcttgtacccattggtttggttcagaattttgttttagagggatgtcaatcatggaagtaaagatgggtttattactcaaacagtttcatttatgggtgtaagttcagatttcaaaggttgaaataacccttattataccaaatgcagcaattcacattttaatgcatggtaggaggtaaagctactgaatttcagactccttgactcctgctcctaaaccacaaacttcatctgcaagcatttatttcctgctgcccagcagtggggagatttgtcttataaggagtgtcatcagcaatctttggggacttaacatgaaaggatattttctcccatgctgtgctccaaaattaatttggtttcttaaggttcataaattgttattttgcagttatttaaagtatagcatttgccttctacaattaggttttcctctgttctttcattataggatcaaacatggcaagcccctacttgtatctttgaaactttgaaagctgtgagttgtggtgcccattagctttggtctaatgactactagctattttggaatttgatggtcttacagtctgtattcaagacattattgggcttgctcagggaatattaacaaaatttaagacattcgtagataattggaataaagaaaaatatattgtgttttcacgttgttctttctgaagaatcaattaacttcatggcagcccccatcctgtctttaacattctagcttagccatctataagttttccaagctcaaactcagagctttcagcaaattcagttcttaatgggaaaagtgacagtgattagggatggaggggactttatgttgaaactaatcaaggaaaatggttttcagtcaataaaagcattgaagttgtactttccgtcataacaaggaagtagccccctttaggggacacaagaacacttgcccaaatcattttggaatccatacatattgaatctgacagattcattatggaataacatgggaaatgtgttagtaaaataaaataaaataaaatgtgttagtacaataaaaataggaaacttagtttgttggaaatggggtcacaaaatgtattttttttaatttttataatttattcaacatattacattgttttctccagtaatctttcaaatatagtcaccactatgcttatatcaagtaccagattcttgtttagctgtaccatgcaactaattgtcatgtgtatatgtgttttatgactttagaggagaaattttttggaacaatgctttaaatatttatttagccattccatgtggcatttacaatacaataatgaggagctctggctcaaagacctaacaactggcaccttgcaaacttagagattcagaagcttgcctcagctacatctctctctactccctgactgttcttctaagattgttacaactgcttataactgcctgcattgtgccttgcccttgatgtgatacaatctgtatgtcttgtatattatgtggcttttagtggtttcatatatattaatatctaactaacttgaaatgatgttagctgtgtccatttactctttcaacagatgctacctggcaataaaggaaacaaagcaatgggtatttttcttgtttgcctgccttccttccttccttccctccttccttccttccttccttccttccttccttccttccttcttttcttcccttcctacctttcttgtttcttttttctttttctttttgtgtgtggggcgggagggctagggttttaccagcaatctaaattcctgattatatcctaaatacctcttgtatcagggtcagaacacttacaactttctcattaggataggaaaagtagacatcagacagaggaacattttccttaactctggcttgtgatcttttggcttaacatcagcatgcaactataaccaccacaagattcttttgtcttttcattcaacttgtcctgacccagaaagctctgggtataccttgcattcttttcctggtccttacctatgctttgagaagcaaccccttgaatgcaaacaatttcgcctataaaattttcccctaaaccaaatgaacaaaaataatgggaaatattttctaatcttttggctctcatttcttgcttaagtgggggaactgaattgactctaaatagtgtataaaatcaattgcagttggaagaatgtgtccaagtttgtggattcccaggagtgggagtgaggtacattttgccttgcaggcacagccatgattttccacagatatatttaggaagggcctgtgaactagctttgttttcactacccatcacagtcttggtgtgggaaccaaggacactgaattggatatgaatttccctttcagcaactcaactaataactcagggacaatgtgaagtcaatttacccttatttaaaacattcttcatgcaggcatgtcttttatttaatgtagtttttattttgttaaaggtttaactggttaagatgatactatatttctgacaggagtaagatggtatctcagagttgttttgatttgtatttccctgatgattaaggatgttgagcactttcttatgtgtctttcagccattttagattcctctattgagaattgtctatttagttctgtaccacactttttaattggattatttggtgctttggaacctagcttcttgagttctttgtaaattttggagatcagcgctctgtcggatgtggggttggtgaatatctttttccattctttgggctgctgttttgttttgttgactgtgtcctttgccttacagaagcttctcagtttcaggaggtcccatttattaattgttgatctcagtgtctgtgctactggtgttatgttcaggaagtggtctcctgtatcaattcattaaagggtacttcccactttctcttctaatatgttcagtgtggctggatttatgttgaggtctttgaaccatttggacttaagttttgtgcatggtgatagacatggatctatctgcagtcttctacatgcccctatccagttatgccagcattatttgttgaagatgctttctttattccattgtagaactttagcttctttgtaaaaaatcaggtgtttgtaggtatgtgggttaatatcaaggttttcaattcagttccattggtctacctgtctatttttgtgccaataccaaactttttcaggactatagctctataatagagcttgaagttagggatggtgatgcctctggaagttcctttattttacagggctgtttgggctatcctgggtcttttgtttctccatataaagttaagtattgttcttttaactcatatatggattttagacatagagcaaaggattatcagcctacattccacactgccagagaagctaggaaacaaggaggaccctaagagagacatacatggtcccccggagaaggggaaagacacaagatgtgagcaaattgggagcattgggggaggggagagggagctaggagaatgagaaggggagaagaggaggggtgaggaggacatgagggagaaggaaggtcgagtaaggggaagaatagaggagagcaagatacgagataccataatagagggagtcattataggtttaaagagaaatgtggcactagggaaatgtccagagatctacaaggatgacaccaactaaccatataagccacagtggagaggctaccttaaatgccatcccctgataatcagattgatgactaacttatttgccatcctagagccttcatccagcagctgatggaagtagaagcagatacccacagctaaacactgaactgaactggaacccagttgtagagttggaggaatgatgagcaaaggggtcaagacaaggctcgtgaaacctacagaaattgctgacctgaacaagggggagcccatggtccccagactgacagctgggaaaccagcataggactgatctggatcccatgaacatgagtgtcagtgaggaggccttgagaaatctatggggcctctggtagtgaatcagtatttatccctagcataggaatggactttgggagcccattctacacagagggatactccctgagcctagacacacgggggagggcctaggccctatcccaaaggaattgacagactccgatgaacccccatgggaagcctcaccctccatggggaacagaaagggtatgggataggtagggtgttagtggggggcaggggaggagaagagggagagggaactgagattaacatgggaaacaatcttgtttctaatttagataaaaatggagaaacaaaagatactatattgccttcagcatgaacaatgaaacatgctgtgtgaaggggtgggggcaggcagtggactggtgaagatgtcagacaaggaacaatggttactggcaatggcaggaccatgggaggcctggggaggatttacccagaatctccatggggtgaggtgctgctaacattttttgaaaagtagaactttgaaaaaagaaattgctcttttaagtggcgcagtttgtgctattttgttagggaagccccagaagactaatacactaattacttagtataaagaagcctcctagcaattgggttccatagaattatttaacttgatttgtaagtagtaatagttgacttttattggagccctgtgaggcaggcatgtaacacataacatctgcttaagtctttagaacactcccaggagatgctagtagatcattacaggtgttgaagcaaaatggttcaagttccttggtgcagttaagacacacctctatttatttagttatgaactgctaaattctctagcctttcaagattaagaagtgatgtaattgtgtgtgtgtgtgtgtgtgtgtgtgtgtgtgtgtgtgtgtgtgtgtgtgtgcagtcctgaaaaagccagggatcttctccatgtcaatgtgtgtaatttctatgtaagtgcataacaatgcccttctcatcctaacagcagaacaacacagagttttggatgcctgcttggatttaccagttccgaaatctccttataaatcacttatcctgtcagatccatctcttaatctagaaaacgaggcttaactacccacctctcagcattattgtggctacttattgaaagtatccatgagaagtcacctaactggagtcactgaccaacaaagggtgatgcgcattgttctttgcttttcctcattagctctgacggtgtaactgggttatcatcttttaaaatttaactttaatagtttacctgttccttgagaatttcatacatctatacaattattttgataatatccacccactatgatctccccccaacatatgccccttccagctgcatgtcctcttgcttgttacagatccaattaaattgttttttttctcttggttgaattttgataggacatatttctctataaattcgtctttttctttcagagtttcccatttattgaatatatatattaagtataatatataatatattatatattatatattatatatattatatatattaagtaagacctaaagaattttttgtatttttaaatggttctaatttctctctctctctctctctctctctctctctctctctctctctctctctctctctgtgtgtgtgtgtgtgtgtgtgtggttgcatacatgtcatggcacttgtctaaaggtcagaagatagcccaacagaattgcttctctttttccaccatgtaggttctggggactgaatttgggtcatcattcttgacagcaagtggaatttgccatctcgcctgctctctccttttgtctttaatttcattaatttggttcttctttcttttggttagtttgggtaagggtctgtctatcttgtttatctttctgaagatacttagagttataaatttctttccaaggactgctttcatcatacctcatagattgttgcctattgtgcttttgtttgattgtaggaatgctttaactcccctcttgatatctgaggaccccattcatcattcaaaagtgtgtcattttgtctccatgagcttgtgtgtgctttagtgtttctattgctgctgacttgtagtccttttccattgtgatcagaaagaatacatgaagttacttcattttcctgtatttgttaagactatttctttaccctaatacaagatctattctggagaaagtttcatgggctgctgagaaacatgcatatgtttcagtgtttggaagaaatattttgtaaatgtctgttatgttcctttgatctatgatgtcatttaacttagacatttctttttgagaggggataacatactaattggtgagatagagtattgaagtcactcagaactatagtactgggattaatctataattttatatctactagtatttgttttatgaaattgggtgtttggaattgtaatgtccattgtgttagttagttgttttcaatgctacacaaattagtgtcagtgatgcctctattaacacatataagataacttcagagtcacaaaactccatcattgtctcagtaaggcatggtaacattaacttcctcctggattaatttgaccaagatgtagcacaatttgaattttcacttctttttctgtgtcttctctgtctatagtttttggtttctggccaatctgtctgttaggagtatttgttcctgatacctgtgaattgcgcctgtgtctaatatgtgtatgtattggaatctgtgcctatgtgtgtgaatctgtgcctttcctgtgtctgtctgtagtcgtactttcctttgggccaccagctcacaaataacaacctggccacataaacagacatttctctttctcctgcctgttccctaatacccagctgccactttccaaataattgacttggagacttaatcttacttataagtgctttgccaatagctcagactttgttactagctaacccttacattttaatttaacccttattccttatttatgctcttccacatggtggtacctttattaacatggcatgttcatctcctgctccctctgcatctggctggagaatcctgactccactcttctcctacccatcatccttagtttggctgctctgcctatacttgcttcctggctactggccaacaagtattttattaaatcaattcaagtgacaaatttttacagtgtacaaaaggattattcccaaacatggcgatttattattaattatgaaagcttggcctgagcttaggcttgtctaactagctcttattacttaaaataacctacctaattttattaatctacattctgccttatggctcgattacctctcctctgtactgtatgtctcactggcatctctctcatgcctagattcatccagagtttctctctctgcctggaagtaccatctattccccctgcctagctattgaccatttagctctttattaaaccaatcatagtgatgcatcttcacacagtgtaaacaaatgctctgcaacatctgtcagttcattttgctgtccctaacaaagggctttgctttatagttgaataagaataagaaataaagcatcttgttggaaaggaatgaggaattttacagaaatctttaacagagttttacctggaaagaagtctttttactgacttcaactgactcagagcagcaagcataaccacaaacagacattattgagttatagccacatgttgttttcaacacttattaagacacatgtttgttgtataagattgcttttaacctgttagcagcttttgaccaatgatcccacaattcacacatttgttactctggctcaggggcatagtagagtacataatttaaaatgaaaggtaaaggttagtttaggttacaaaaactgatcacctgggaaatccaaggcataataaggttgtcacattgttatcattaaaggcagattaaaaattaaacaggccaaatacacagtaacatagcagcttaaatacacactcaaatgatctcaaggattattaactgtgctgtgaggtctccaaaaagtttggtgttttggaggtcaagagatattttcaaaagattgtatcattgcaaactgggaaaagacaacctgaactgaaaaattgcctccattagattggcctataagcatatctatggggcatatccttaactgttaattcatatagcagagccaaactcactgtgaacagtgacacacctctttcaaacaaggccacacctcctaatccttccaccaacagttccaacaactgtgaaccaaaattcaaatttatgatgctagggtggtcattctcatacaaatcaccacacagatgtatcttgaaagtcccactggtaccttattattttatccttctctttgtttgatagttccattctttcaccttgtatttaaagtcagtctgcttttgctttggtttattccattgctgaaactttctgaagagttttttttttatttcaaccaactatattatcttattttcatcatttcagattgttttttatctttgttgaacttttttaaaaaatcatttgtcactttctttattttgttcagttgtttgcttgtagtttagaatacacataatcattatcttgagttccatgtttgggattttatctaactctttctcattactgcaaggttaatatttttagaggagttgtgctgtgttgttattttctgttttgtatttcttatgctgttatgttgggatttatgcatccagtattggttttctacctgtcttacaaattttctatcacttaaactatttgaaatgctcaagtgggacttgtatgtagagtatacagttcagaaagtagttccttagtccaaggtctcaggatgcctgatataaactctattttatatcttgagtcagatgttaacttggaagaagaaccacagctacttgatactatcacaataaaatagcagaccagccaattaataacaggaccctctttgatgtcagtcactgttgaagcataaacaactcaggatagcatggggcatactcagattctggttaataagagtagaagtgggagggagctaggatgagtcaaataaggattaagtattagatggactttgaaaaagtaatctaggtgggtaaagtaggtaggatgatactgttatcatctgaagattttagagattgtacatctacagaaagtcataattaaaaagcaaagggaggaggggataaggatgagaggaaggagataaaacatgcataagagagggggtgtttgagacacacagtaaagaatgccttaccataaactggatgaagaagcatgaacaacgtcttaaaatctaaaagcaattatgaaagcaaaactaccacgagacatatttaagattatgaattaaatagtagaaaataagaaataaagagattgcctgtggggtgaattggtgacaccgctgtgcggagttgaagatgaagttctcacccctctggctcccaatgtctccatttggtgctgtgtctgagtcattttaaataagtagttttcatggcgggtgacttgttccctagggagaacttgccaatatctggaagaattttttttctttctgaaactcaagggtaggtgggatggcaatgctgacaactttgagtagaaacccagcatgctgctaaatttagtccaggacagcccactcaagtaaaggtcaatattatggttgagaaaccatttgtcaccaacatgaatattaccctattggagacactgtgaacaaggtatatttttttttcctggatcgtttcaatttttgtttcctagctgttatggattatattaggtgcttccctacctcctaccatgaaattagtaagttaaagctctaatgcctagtgtcttcgaacattactgtcttcagagatagcccatttaaagagagaattaagttaaaaaaaaacaggttagtgatccaatatgactgatttctttcaaagaagaaatcagggcacatagtacatgaagataaaaagcagtcaatacaatttgagtgtgtctctcatacatgggttaaaacctaattcccactgcagccgtgttggtacgtgattgactcaatcatactctgcctttgtggataggtggatgagtgggttaggtatcacagaagtgggacctggtgaaaatgggttcattccccttctttgtcatatgcccatgctctttgcctttccaccttccattgaaggatgcattcagaaggacttgaggaatgctgaatagggtccagcagcatggttggaacttcccagcctttggcactgtgcactgataaattcatgttgtttatatataactccctctcagcatattctgttactacagtatggaatggattcaacagcatctcaggacacagagagcaggccttagcagaaactcaaccaaacctttatcccagtcctctggtctctcaaactgtgaggccagaagtaacctcggggacacatatacctggaggccagagcaggtcatctggtggcctgctctaatattctccatctcattcccttgagacagatctttgacagaactccctgtccttccctctctcctccatatgtgtgtgtacaacctgacctggctctttacctaggttctggggatttcaacaggtcttcttgcttgtgcaacagtgctcttgcgtcctgggctagctctctcgaccctgcagccatttgatgatggccacggtggcccttgtgtggcctctacactactcagctactgctttattttaagagcagtttaaggagctttgaacactccctttaggagacaatgttgatatgggaaaacacagcactggaccattgttttattgtctctaaaataacaaatatctttttgttatttttttgtttttcgagacaaggtttctttctttctttctttctttctttctttctttctttctttctttctttctttctttttttttgagacagggtttctctgtgtagctttgaagcctatcctggcacttgctctggagaccaggctggcctcaaactcacagagatctgcctgactctgcctcccgagtgttgggattaaaggggtgtgccaccaacacccggcacaagcacccttttttaagtttaaaatttttattttagaattaacatggttattatatggtcaaactgataaaacaacaacaataaccaatggtaattttagaaatctataaaattaagaaaaatgctaaaaagtagagaataaaatcactattttctcacagtgaaaatttcctttttactttttggatttattacatttttatatatagagagagatccaatgcaagtatttatttctgtataaggtttgtttgggagtgctgctttaaatatttaagtttattttatttaatgtgcataagtgtcttgcctatatgtatgtcttcgtaccttgtgggtgtctggtgccctcagaagccaaaaaggcatgagatcccttgaactggagttacagatggttgtgagttgccatgtgagaactggggaccacaccctgaccctttggaacaacaaccagtgttcttaatcactgaaccatccctctagttcagaatgctgtttctatagtcccatttcctttctgactgagacttctggggaagtctgagcacatatgcttctagaataagcaaccatctttcgggtgcagatgttggttctgtaaaagatagatacttcctgaagtcatgtgtgtactttgcttgatctctgaagtccaggggtgaaattattgtggccagttccttctactacaagatctgaattctacatttttttttcctttccatatttcagggaatcactttgcaaacaccagtgaatatatatatatatatatatatatatatatatatatatatatatattgcctcatgtttgacacataaagggattgtagtcagaggcaaccaagcagacctgagcatggttcacagttgttctttcttcctaagcattgtcaaaaaggatttctttgtttcagaaatagaatttgtgatagattgaacaagagctgggctgaagtttcttttttatttaaaataacttttattcaatttctgtcatgtgccagctgctttcccaagtgccattcttctatacaatctatgaaaaaagaattaggtatgcaaattaaaattgtaaaaagagagagggggaaatatttgggtctctagtggaggtcatgttactctcatattatttcaaataaacccacttaaaatacattaaatttatcttttatttccagagtaggctttaaaaaattgtctttggaggtagttctttagggtagtgtgcatctggatttggatattttaatagtcacctttctattgctgtgttaaaataccatgaccaaagcaattaactgaagaaagaatttctttgggcttgaaggtgagagtccacgatggcagagaaaaggcatggctacaagaacaggagatgaaagcctcacatcttgacctgaaagcttgaagcagacagtgtgatctttaaattttcaaagcctggccccagtgacatacttccttcagaagaccacacctcctaaacccccaaacagtaccctcacccaagactatggagggcatttgttattgagaccaccacaaatatgttgtatggacagatttaaggcctggcttccacgacttatgaaccaagccttatttcactgttaatgtttggaataataacccttgctttcagagttgttgtcaggattatgacacataactcacataaaaacaaccggtgaagtgacagccaagcattactggcaatcaaagattcaaaatattactacttgaacaggctattctcatcaaacactttttcatacacctctgacctttgtgactcctaaaatatgtaccaagcacatctcattagtcattggagaccccactgacattaagccccttggttttggagggatctttgaataagaagggtacaattgtgcatatagatagactactaataacatagaaaactgtatataaacttcatgtaaaactgtatataaaaactttttatagcactcgggaagcagaggcaggcagatctctgtgagtttgagaccagcctggtctacaagagctagttccaggacagtctccaaagccacagagaaactctgcctcgacccccccccccaaaaaaaaaactgtttacaaaaatggtaaaacaaagtaaaaagaaaggctagggtattgcaaagacttgttctaagtctatgctgcttcagcatcctcatggcttaaattattaccttcttcgaagaagcaagtccacagacacacagatgccttccaggtacattacagtttccaatttttccaaatattaaaaatgtcctaattatatttgtggggacaaaaagcaatacacagtagtttaaaaataacattgatatcactcctcacgttatttcatttcccagatgctgccaaatcaattgtcagccaatctgtgttctttcctggaagacccagggacaatccaccctgaagctcttccagatggattgttgaccaggggtcacagtaatgtcatcaaggtcatggtcagctcctttctatgtactcctctttcatcaactcatcaagttcataagaacatggtcttttttagaaaactgtatataatgtaaatttctgacttttcctacagttaggaacttttatggttagttcagatttaactggaaaagcatgcacccagcccctttaaaaaagtattttattttttgtttatgattgttgtgtcttgcaggaaggtgtgttcatcacatgtgtgcctgatacccacagaggttagaaaaagttgttcgatcccctatggccagtgttacagacaatggcgagccactgtgttgatactgagaactgaacccaggtcctcttcaagagcagcaagtgctcttaacccctgacccatctctccactccttatttttgtatgtttgggggttttgtttgtttgtttgttttcattgagatagggtctctctgtatagacttggttgatctggaaagctttataaagatcaagatagcctcatcctcagagaactccaactatctctgcccctggagtcctgggtttaaagacattccccatcatacctggcctaaactcccttcttttattaattcaaaagtcaactggtgagtaatcttagtcacatccataaaatctgtttttctaagtaatgtaactgtgttagttacctttacacctgacaaaaacaaagaagggcagtttattttgacatatcttgagggtaccatccatcatgacagagaaaacatggtggtagagcctgaggtagctagtcccatggtgtctagagtcagaaatcagagacgaacagtggtgctcagcttgctttttcttttttgttcagcccaggacctgagcccacatttgagatagctcttgcctactcagttaaacctctgtgaaaacaccctcgtagacatagatagagttgtgtttctgtggtaatcctaaattcagtcatgacatgacatggaactaaccatcatagtcatacaaacaagacataacatcctggcgaggtggggagggggtgatatcctgcccactagagtcttcagacagtcacacaacatctatccagctgcaagcttttcttcccttccatcgtgttcaggagatacttcttgtcctttccttttttttggtaactttttttttattagttcaaattaggaataagcttgcttcacatgtcaatcccttctccctctccctctcccccccacccctcactaccccccaccctatccaccctccactccccaggcagggtagggccctcgactggggctccccaaagtccaccatatcatcctgggccgggcctaggccctcccccatgtgtccaggccgagagtgcatcccttcacgtgggatggactctcaaagtctcttctaacaccagggaaaaatactaatccaccaccagtggccccctagagttcggaggtcttctaattgacatccatgttcaggggtctggatcagtcctgtactggcctcccagacagtagtctggggtccatgtgctcccccttgtgcaggccagctgtttctgtgggtttcagcagcctggtaccgacccctttattcttcattcctccctctctggaactaagttccagagttcagttcagtgtatatctgtgggtgtctgcctctgcttccatcagccattggataagggctctaggatggcataaaaagtagtcatcagtcttattataggggaagggcatttaggttatcctctccaccaggagattgcctagactgtcaattcatgtcatccttgtaggtctctggaaatctccctagtgccagatctctcctcagacctataatggctccctctaatatggtatctctcatcctgctctcctctattcttccccccactcaatatttctgatcctccatttcctcctctcctctcctctaatcctcctctcattctggcagctcccattcccctaccctcattctcccaattagctcaggagttcctgccccttccgatttctggggtccatatatttttcccttagagtccttcttgtttcctagtttctttggtgaataggattgaaggctggtaatcctttgctctatgtctaaaattcatagatgactgagtacataccatgtttgtctttttgtgactgggttacctcactcaggatggtttcttctagttccatccaattgcgtgcagatacccttttaagttgttcttttaaaaggatttattgcaagttttctggattgatgagtgtatatattgccttccttcctttctaaacaacaaatgttgttgttgtctcttagctacttatctttggaagataagatgctagtggaggaagtgtggatcaagaatgtgcacatctaaagtgcaggtcaacttccctgtctgccttctgaaggtgctgggtcagcacagctccttcccagggcgcctttgtattcctggtttctctggacttcgacagccctgggttctaatgacccttttccacttgctactgttgtgaagggaatgtggtgccctccttacatactctttgatgactagtaaggtctgattctctgtttgttgacaaatgttcacatatgctgcttcatttgtgaactgtctgttcatttcctctgtatggtaggctcagttacaccaaataaacaaacaaacaaacaaaaacaaacaactccagctaaatcagatatgattcccccccaccccaaggatatggagaactttacaagatcagagagaaaactagagaggaggaggtggtaaggaaggctgctgactgggggatttacctcaaacagtacagtgcagagagttaaggacatgtgggcacctgtcctggagttttctgtccagctgagcccattcctcagtcactcttctatttttcccactgtttcttgagtctcagggtttaggtagcagcacctagttgactgagcttaggtctcatgcttatcctatgaatcagatactctggccactttggctcctgtattagacaatgggaattcatgcttcagcaccgctggcctcctttggatacacacagatgctggctggccacttcgcaaagatacatgtctcatttttgtggtttcctttctgatttcttagatatcttatatattgatacctttatactctgccatatgtatgccatatattatttcagcattattcttttagtttttctcttttaataacttctatagctcatagatcccacacacatttgtatatatatatgtatgcacacacacacacacaaaaaaaaaaaaaaaaaaaaaaaaaaaacaccacattgcttttcctcctcctctttttcctcttccttctctcctctgtggcggcaagcactcaacaactaagatacatcctccaccctgtcttagatatttttatggaagaataaccttaaaaaatggctacaattagttctttcctaaaaaatctgatacagctcaggtgactttttttttggttttgtttttgggacagtgtctcactgtgtaacccaggctggcttccacccttgattctcttatctctgactcctaattgctgggattgcagatgtacacctctaagcttggcacattttccccttaatcacatccactgacctagccccactgaacccaactaaggagttagctatggagaaaggaggcttgctatgttgtgacatttttgcttgtctcctgtcttgtaaggttttacatactgagtgatggaggactccctgaattcctttttttggaagttatagatgttaggtgtcagatatagatcaatgtgagatgggccatgggagcttaggtagtacattgaattattattccctatgctgctggcctagcattggataagagcagacgtgatggtagtgaagctgaagagggatttcttgcttaagatcacagtcatatgaaactttgcaattaaccttcaccacacaggtaatttctgggtacttttttggccccaggcttattcaagggcttttagaattaagaccctcttgctgctcaaggaatcttaaagaaatgggaatagatagatacaacccacccctaaaacaaaaccaaaacttgaacccaaaatttgtctctaagacagatagtcagatattcctggttagttggtttgatctttaattccagcgcttgggaagcagaggcaggcagatctctgatttttgaggccagcatggtctacatagtgagttccaggacagccagagctatgtaataagaccctgtcttgaaacaaacaaacaaacaaacaacccccgccccaagcaaaaatcaagcaaacaaaaaagaacaaaaacatactttctcagttattatcttacattctctcaaatgagttccctttgttctaaggaatgaacttgtgtcctgctaaaatgacccataatcccttcttaaaagatcagcctctctcaggtgggcttaaacttcttcctgttctggaagctccataccagaacttacaaagtgatggagggatgcagttcagacacctatgtggccaagatgaagaagcatgatgccacgggaagtgaatctcagtacaaagttgggagaacatgctggggacataaaggaaatgcaaaggtgttttccaaaggactcagtgggcagataaatccacacttctcaatcaatactttcgagagctcgggaagaaaaataaatgttttagggtgatattgctttccagatttactgtttatagttaaagcttgtgagaagtgcccagtggtgctttgaaaagtacctgtgcactgttatcatgttggttacaaatgccaggacacagtaaaatttccttctctatttttgtcaggagagacaaatacattcacatgggtagaagttccctctttggcattcccctgctccattggaaggtaaaacttcttctttttttttttttttcacttttcacatagtttattgacattttctcttatgttacatatttctatatattttaccacagcatcatttgttgaaaagactatttcttatctaatgaaacaatcttctttatctgacaattttacacaggtatataataaatttttgtcatttttattccttccattacctttccatctccttatttctcatacttaaaaccttctcaacaagtgccccctcctactgtgtgtatatgtgtagagggtacatgcatgtgtacaagtgtgtgtgtatgtatgtacatatatatgtgtatttgtatgtatgtatgtttctgtgtgtctttgtgtatgtatgtatacacatgcttatgtgtatatatttgtgtgtatgtatttgcgtgtgtgtgtgtgtgtgtgtgtgtgtgtgtgtgtgtgtgtgtgtgtgtttccactgagtttaattagggttgtttgaatgagcatcagtgggttattttgccagtgactgcacaactaaggaaaataatacctcttttctcagcatcgaatggggcctcatgagcccccccccaacttatgatgaaatattcactaataagctattattggtggagtgtttagctacattttatctacttttttatttaataatttacaatcattttacatatcaatccccccctttcctctccctcccatcttcctatactccttatctcccctgccaacccaccccacccactctctaaggacagtgaggccttccaccgggaatcagaaagtctgtcacatcatttggaggagagcataggtcctcctccgtgtatctggggtgaaaaactatcactccatggaatgggctcccaaagtccatttgtgcactagggataaatactggttccactgttagaggacccacggactgcccaggcctcttaactggctcccacattcagagggtttggtttggtccaatgctggttccccaactttacaactggggtccatgtgctctcactaggttgggtcagctggtcctgtaggtttctcctgcagtcttgagtcctttgttcatctcttctccctctctacaactggattccaggagtatggctcagtgtttagctgtgggtgcctgcttctgcttccatcagctactggatgaaggctctaggatgcaattaaggtagttatcagtctcataggggaagggcgtcaaaggcggcctctctactactgcctagattcttagttggggtcatgtttgtggatctctgaacatttccctagtgccagatttctctttaaacctatactggctccctctattaaggtatctcttttattgctctcctctattcctcccctgactcagtcttcctgatccctcatatcctcctcccccttcctcttctccccttctctgtttcctccctccctcccctctcctcccatgctcccaatttgctcaggagttcttatccccttccccttcttcgggggagcacgcatttttgaagacactattccttttccaatactaatgtgtacagcaccaagctgtggtctgttgttgggccccatgttgatgaaatatgtagaatggcatgatgggtgctcccaggaggtaacttggaaatgagttccacctagggctgaaacttgcttttctttgtgtcttaattaaaaaattgagactgaaatatcattacattgtttccctcttccatttcctccctttgccaagcacccctcatcttgctcttctctttagcagattatcaatgaaactgttcttaagatggaggctccaggcgtggcctgtgcccctgcagtgcagagtgactatgccaggagttaattctgaaatgctgtttcttctaagagctactataatccctttctcctacacagagaaaacaactggactctttgttgagttgactatttcctcactgaaaacaaggcagggagggatgagggagtaacttagaaggaatttacaaaggcgggccaaggaaatttaattttagctgaaaagttgaagaatgcaagtcctcctcctctctatggcaagtccagagaggcatgtgaattgtgtcctggttacaagtgtatatcccctgatggcacagccctgctgaggaggtcggtgggcaggaagtggttgtatgcaaaagccccaacaacatggccagatactttctaataattgactaaaaccaaactgcttctctgtggacccagtatggcactaccactttgctttcttgtctcctttgtatcatatcagtctcttacaataaatctttccaccaaaagcccacaagccccaccgccacgtgtgagctttacgacagccacccgcctgagttaggcgcaaatgaatatacagaaacttgtattaggttcaaagctgcttggccaataactaggattgctcatctgttagctcagtcttaactatcataaacctatatattttgtaagacttatcttactggacgccttatcggtgtccctccttgccagtggctcacatcctgccactggaggaggtgaatgggacaaaaaggacccttcctgtttctccttcgcttaaatatgagtctccttgctatgtcacttcctgcctggatcagcacttttctactacatttcccagaatcctctttgactcctagtccttgcttgccattggtcaaacagtattttatttaacaatcaataagataaatatacacagtagtacattccctatcatcagtccttaacatttagttgatttatttgcttcttatgtatatacacatatgttttgtgtatgacgttgtgtgtatacgtctggagacagaggttgatgggagtctttctcagccactctccaccttagtttttgggacaggttctctcactgaatctgaagcccgtcattcagataggctaatctctatccccttcaaagctaggattatagacattggtaccaggggtgtgaactcagttcctcttgctaatgctaacactgcacctactgaactatctttccagcccttatttatttattctggagacacagtcttcccatgtggtctaagccagcctcaaatttatgatcttttggccttagccccagctgcgttggctgctattacagaagtgagccgccatgcccacctctgttggtacttataaaataaaataaaaaaatagttccatttatttgtgtgcatgtatgtagacatgtgccacagcatccctgctggggacagaggacagcttgcattcgttagttctcctgctatgctgattctgggcactgaattcagttaccagaaacttagccctattggcaattatctaaatacaaatttagtatgaaattcttcatttatatggtcctggtttagacatttgatctctgcccgattgcgcagacttctcccttgcttgtctatgttgtcttttttttttattttctctcttctttattcttttcttatgctacacctaatcctaggcaaaattgtgagatctcactatcccagagtcctccaggccaggatctgctgtcttctacaaattctgcattttattcttcggtgatattatgttattttcccatcaaaataacaaacgtgactcacttgcttcactgttatttttctcagatgatctccctcttaaccattaccaaagtgttcagataaatgaaacatcaaagtgaattttagggggagacttgaggatggatgttccagggactttgtcccacgggcctgcttcccctgtccttcatgcagcatcggaaacaatgggaacgaagctttgagaaacactttacttcctctttcagggccttcaaggtgctcagaacctcctgtaaggaaggaaacatctgggtgacaaatactgacgcaataaagctggaccacgcatgcatcccagcagatccagagagccaggggtggttggatgctggagcaggactgtttgtttagctccaccaagatttgtgcccacagataggtctcaagctgagaaactggaaggactggtttggaacagccaagatctgcagggatgcagagccattgtctttacagagtggagtttttaggctgctaatccagagaacagatagaagttgtccaggtgttgtgaatatccattggttctcttgggctctgatgacagggaaattgcttcaggcatgttcagtgcctttagacactatccgctggccttcaaaactcagtaacaccattatagaaaaccagccccaaccactcagaggaggaacaccctcccttatgcttcccttgaaccctgatctatgagagctatccccaccacactgccatgtaatggctctttcatgtggcattctctagcttgctgcagcatgaagaagcacgttatgcacttaaacgactatccactcagctaaacacatgtctgtcacagactggatgcccagcaaatgtttcttgagggagcaaatacaagaatgtatcgtttagtaaagcagatgatggaaaacttgtgctaattcaggtttagactccagaaaaggcatctggcaactacataaaaaaaaaaaaaaatcgtctttgaacttagactgtgtttgaaggcctcggggttaacggaaatcaacaaggttatagaggtgctttctcagtggatggaagtgaaggaggacggagaagctgactcattcctttgagctgacaaagtgcacaaatcactccagacaatggggagaaacatgcatccacccatggaaatcagcgtgacaaaaggggtctgagcagatgccctccctctggtcctgaccttgccctatgtctccatctggatttaatcatctgggctgtgtaacttgtggcctttatgcccggcacctccacctccttcaggaaaatacgatcagggttagaaacacggggcggggggggggggggcaggttctgacatgcgctgttgtatgagagacatcagagggcagggtggaagtttacagtagaacacaaagcgccaagtttgacctggaggagggatgtcttgagagggatgaattcttttcttacctttcttaaggtatcttctgtgttgtttgaaaatttaaattatctgcatgaattcctttgataacaataataaaatacaactaccagctggcaggcagaggcgtgggaggagtgactgtgtaatggctgcactttgaagaaaggctgcgttcaggtcttccctggctccgaagctctgatagcatgagctgggcaagagagaagaagctcactgaggattcctgctttaaggtcctcgaggttcagtttctcctcagttggtcctgatgtctcccagctgtgttaactatccaccttgctatccctcaatctcagctaggcttttttcctgatttcttttaagatttgtccttatatagccagaaagggccttggaaagctgcagtagagttaattacaagcagtccaacacatggactctgaccttacactcagagcaagccttatccttcgtagaagtgtgacactcacagccagccttatccttcctagaagtgtgactttgaataaatcacacacactttctgtgctttgatttcttcatgtacatgggaaaaagttgacagtggctaccacccaataaaagcttagcattaccatttagccagggatacacatttatataaagttctttctttttttgttttgagacagggttttatagcccagactgttgatgagcttgctaaatagccaaggatgatcttgaactcttagtcttcctgcttccctctcccaagtgttgggtgtcctggctatttatttattgtcaacttaatacttggtagagtcatttgggaaggtactcaattgagaacatgccccacctcccccagactgggctgtgagcatgcctgtggggcattttcttgattaatcatgtgtgcaggcccagctcacagtggacaatgccatccctggatagttagtcctgagttttataagaaagcaggaggaacaagccacaaggaacgagccagtaagcagcattcctccatggctccaggttcctgccttgagtttctgccctgacttccttagatgatggattgtgttgtggaagtatgagtgacacagtccctttcttccccaagcagcttttgatcaatgtattgaattacacaatacaattgcttgcttagacactggggttacaggtgtgtgtcactgggcaaaacctgcagcatggcatcacgcctttcttctatagatggtttgcattcaccaaagatcttttctactcatctatcctgcccagggtaggcacagagccagtaccaagagaagagctttctaaaaagaaaagtatttatttaggcaaattatcatctgtttcaataaagtgctgttttccaggtttctgttccttcccttgtttctccccaagatggcatctgaatgggtggttcaaatcatcacagtgtggtggacagagacttgcttccactccctgttgtctgtattagttaagagtctttaggggaaccaaataaaataatagaatagattagaatagagtagaagaaattgaaatagcatagaatttggataggataggataggataggataggataggataggataggatgcaatagaagaagatttattaggttggcttatggggtcacagatgctgaaaagttctgtaatggctgcctgaaaactgtgtcatcagacactgctgctgctttaggaacctggagacacgagctgaagcacaagtcactgaggaatgctgtttaccgcttgctcccacaggcatgcttacaggccaatctggttgggggcatattctcaattgagggaattgagaatgacctttccaaatgactctagctggtatcaagttgacaaaaacaaacaaaaaaacaaacaaacaaacaaactgggacatccagacattttcaatgaacttgttagaaccccgagagccccagaaagatattaaggtaagttccggagttgaaagactgaaattctggagtgcaacctacacataaccatcactgcagatagtatgggtggggggtggcagtgtagacactagcttacaagagtcttacctcctcaaccattctcttctatctgggtccctgacaatgagatattccacatccagggtgggtcttccctctcaatttgctaacctatatatcaactctatctgtaaatatcttgagacacacccagaagtgtgctctctctgggtgttgggcatccctcaacccagtgtacatgactgagtattaaccagcacagagtcacatacactctgctgggttttgctgtgttatggcttacgtgggtggctccctgacctataaccactaagggtcactgattccattccagagtgctccagtcttaacacactctgaactcagcctttggtgtgtcttatgtcctttctgacatgtctataccgtgtcagtggtgcagaggtatcctgtggctttctcgatcctcttatgacagtcttcgtgcagcacaacgggcagtctgggtacagcactgggtaccatgtctctcatttgcagtatctgcagactttacggtataagcatccttgcttggcattttcagtctactcatgagatgccatcagacctttaaggaagagctaaactttatgggtatgataaaggtaaccccaaaataacctacaatagacaaatgtgtgtatcaaaagctatatagtgatagtttttagtatttctcaattttgttttagtaaaatttaattttgagttaaatttaattttgaataattactgtttaactagtttgaacaatcttagtttttctttctccatctctttcacccctccctcctctcttccttcctccttctccactttggtctctttttttttccttctttctcctcttcccttcctgcctcatcttctcatgctaacacttgcacttaaggccttgtgcacactttcatgtgttttactacagagcaatacccacattccacagcttcctgaactctggctaccactcactgtacctaggctaccttgtccagacagctgctggctgtcgcaccctcaactaaactccacattccttttcagggacagattgaaagataaatttaggtccaccctcttctgtacacaaggtaatgcagaggcaaccagtaacaaggcactgaagaaatggggcagaagcgtctctgcctgaagcactaactttgacccacataatttactttgcccctggtgtcgtccttctgaaaaagctgaatatcaaaatcccctaaactcctaaagcaagttcactcaatggtcagtcagttcacagacactcattttcagatgaaaaaaaaaaaaatcaacccaatttacttctttcattttaacagattaggttttgttgttttagtagtgtttgaagaatatgaagtttgtagccggaggaacttggttcctgtgtaggcgctcatgttggcatgcccttcctacgacacacctgttgagttactttatctgctcctcatggccctttcttttccggcacctccctatgccctttgccactttgcaggttcaacagtctgccccatctcttaggcatgccgtatgttcactggagatgcatcggagacggtgcctcagctccagctctgacactgggtattctttgccctaacagattaaccttatgatgcaaacaaacaaaatagagaaggctagcaaaagaaataagcccaaggaattctggaaatgaagtccttacagtgctttctacagacaccccatggtactttaaatcttaggggttgttattccttacttaatgttgtgctagtactcaaacccagggccagtgagtgctgggaaagtgctccaccatgagttataatctccagccttccattcttttaagatgagatcttgttttctctgcccagactggcctggcctccttttcagactccctagtgccagcattaacagttgcatgctgctacagggagctaagtacagagtgttttaaaatgctgggctcaagtacctaagccttcatgtattgaaaagccactgaaggtcaactgggggactgatggcattttatccggtttaagacactgagctgcagtagaaaaacatgagaagtagtacctaaacagacattttgtaagtagagaattcgactaaggcaggtaaaaacctgcactccagtcatggaacagaccagatgtttagtcttctgcttggtatcataattagtggaccaacgcccaccctgaaaacacacatacacttttttcctctgttgatttgtcctcttcgtggacatttgtaaatttgtatttatgagtacaaataaatgcggctccctcactaggctttgaggttctgcagtgatagaaatcatgcctgcttcattttccacagtggtcacagaggacatgagcacaataagtgtgcaccacaaacctcagagagcaagtatagacccgagaacaaagagggcttcaccagtgtcagcactgggctattcatttagacaagagaaaggtggtggcttcagaagaacagaggagacacagagcagggcaataagagatgacactggagaagtacgagtgcataggatcaaagcccataagtaggagagctagatttgcaaacagcagcctctcttgtatcaccaaaggaggcacattgcatcctaaggttattaaaatgttgatctcttttctggagacattgaagggactgtcgtctactgaaacggaaatagggaggagaagggaaaagaggagaaatggggaagaggactaagaaggaagcaggagaggagcaaagaaggaattgaaagtcccagggagcagtgtgaattactcctgggaagtggatgagctgaagaacaactatgtccctctggggagggtccagctgagaatgcatgaccaaagtaccaaatctcatgggtgagtgacagagaagtgacccaagcccaagtgataggagagttgatggccagctgtgaagatttgtggaatatccctccctccctccctccctctcccctctctctctgtatctctgtctctctcttctctctctctgtctctacctcccccccctcaggttaaatatctgccctgctgcaatgcaggaagagctcaggactcctggactggtgggaatgaatcatccacccatctctgcatcttgaaatctttgactatgttagacaggacacaggcatctggggaaggtcttcccaagagctagagatggcctcattttctaggtcttaggtaactttggccttcactatgatgtcttttagcagtaaggcaacttctaagatatccaaatatgtttaacaattaaatggttgctccccgtaaaagaaagtatatgaatttgaggtgaccctagttcttgctgtgcaagaactgtatcacatagctgtcccttagtctagttttacttttatttttgaaatgggtcccactaagttcgttgcccaggctagccttgcacccacttggtagactaggcagcccttgaactggtgattctcctgcctcagcttccgtgtatctgcgactataggcctgagtcactgggtatggtttgggtttagactttcatagatcagggcctgattccttgctcacacacgtggtagtgtgccatcttgattcagtcactgaacttttcagtctgctgatattgcaagtaagaaaatcactggaaccatggaggaatcaactgggaaaatgtctataaatctcctaaaacccaacagcacaaagtagataataaataagaatttttaacatcctatgtttttttcatttctccttctcttatatttttatagtgtttttaaaatactagagtaccagattccccagggtaaaaacagcatctttgccattgaaagtaacatttttgaaaaaaaaaatactcgttcttactaaaattttcaaattctctatgataacatgcttatctttgttgccactttagtctcattttccagaaaaaatcatatcagttactaccagttttgagttttaaatatcctcatgtcagcttgtctaaaaaggttttatacttttatttgttaattcattggagtttgtgttctcactttgaccaaaaataatttatcctactaaagccatcatactacctctgcttcccaaataattgtttcttgttaactcctctattggtcaacttaataattccaaataacaaataacattttagtcagcttggtgtcatatgcaacacttgaatccttaacttggaattcacgacattggcagaccaattcttccctcagctttccccgtccattttgttttctaacttctgtcagtttactaggcttgaggtaggtaaagcggctctctgttatagctctagttaaactttgcacatttttgtgataactagattcaaaacagtaaatatttgtggttgtttgaataaaaatgggccccattggctcatagggagtgtcactatggggaggttgggcctcattggagtgagtaggcctctgttggaggaactgtgtcactgtgggtgggctttgaagccgggtcaagtgtgtctctcttcctgctgcctgctgatccagttctttctctagcaccatgtctgcctgtgctctaccatgcttcctgtcatgatgacaatggactaaactcctaaactgtaggccagccccaatattatttcttgctgtgactacctcattattatttttggcttcttttataattagtttatggctttcttgttggaatttttgttcttcctagagtttgcaattgccttgtttttcctcccattttaaagtgtgcaggtggcaatgaaagccagaggtatctaatcttcctggagctagctggagttacaggcagttgggggcttcccaatatgagtgcactcagtttctcctagatgacttaagaaccccaagctccataatttttcaaatttccttagtttaacccaatattatgtttccagaataccgtattacatttattaggtagtttccttttgctgtgatgatttttcagactccgtttgtttggttgaccttgatagatttatatagtaccagtgaggtactctttagattatccctcaatggggatgcatctgatgttttttcttatgactagaatgtcactgggtttctggaaggaggggcacaagaggcccagcaccactctcatgtgcagtatctactctgcccatgccatccctgtggatgtgaacttggtcagcagactgagggagcttcatgtttctgtttcactccctttgtgtacttttgggaaaggtcattgtatgtgctttatattttacatgggagttatgtttcacttctctgaaagcagagagctctgtaaattatttgaaattcttctgcgtgatgtggttttgtcttctctcttagtcatttattcagttattatttatggttatacaggcacatatttatcttatacattgactttaatcaaatactacttcattttgttcctggatttctttcatctttgactacgtaggacatctttcatttggcttctttttttctttgacatgcctccaatattatgggtttgggatttttcagtaattcttgtgcactttcttagtgtctgtgcatgagacatgtacatgactcattttttgattcttacctagatccttcaattagacccttcttgataaatttctgggcctattattaagaaatattagagaccaagaactgaattctgtttgtgtttgttgctatcaatgcttttgcttcttggttctctcagtggacaaggagtggggggaggaatcaattatgtaatttatcaaccagtatataacaatgagttatttataaatgtaacatctacattagctcaagatgagttcatactgttatctccaattctaatctatgttcgcatggattattctagctggtccttttttaacctatgaactctcagtcagttagtgagaattcaagttcacaccatcccccaacgtttccttggttattctagtccagccgagttatatcatatcaaagccattaactgatatctcatgggaaaggaccctatcagctagggttcaactagagttcagttcctgtaccaatagttttacaagctccattcatttccagtatggcttagttaagtgaccacctaccttccagtgaggttgtttcctacatttataatatagatagattgtcctgtcaccttctaaattcatcctggaaccctcaacataggaattttcttgatgattttttttaaaacattctctttcaaaatcttgttgatctttgctttctgctatcagatttattagagctcatttttctgagtttatttttttaccatcttatcatttctaatagattatattaactgtttacaatttgtatctatgaaaattatcgttttcatgcctgtaatcccaccacttgagaaaaacaagggtgacagattatgaattcagagccagcctggggaatataatgaggaaaaaaatggtttaaaagatgcaattggatccctctgtctaggatcttctaaccactgcatgctacagagtcacttctctcctcacacaatggcaaaggcctgaggagaggcctcctcccaggaggctctgcttttggggaaggcatgcatagctgcaggtgtggataaacttacacctcaagaatatgaagataaacccaatgtaaaaatcaaaccaaccaatcacaaaattcctctttctggggacattaaatataaatacatataaattttccttttgtccatcatgttttcttggcttaacactgttcaaaatgagacattctcacatttctggtcatctttgcctcctattcaaaagttaagggcacagaatatgacttcaggctggcagctctgaggacaggaacaagtcatgctgctgctgagtttccttagaaggcagtttggaaccatggttggggaaggccttgtatcctgctaaagctcttttgggcttattccctgttgaagtgtcttccaatttgattcctaaagtgtaagcaggaatatgttagcaacctagtagccatgcctataaccgtttgccctttcttcagaccagagactcttctgttgtttttccatcagcacaacagctgcatctgaatctactgtggtgatatattatttatgatttattaacacttgcctgagaattcacaaagcaaagccagccacaagccacagaggtccggcagtggtgatacacacctttgatcccggtagctagaagctaggaagtggttgtacacacctttaatcctaggactcaggattaagaggtagacagatatctctgagttcaaggccacccagggatgcacgagactgaaccctctaatacagtaacagaactcatgcctttaatcccagcactagagaggtatataagacagggcaaggtctcagtgtcaagcattcattctccagccacactgagaataggaattcctcagccttgttagaggtaagagctctctggtagtttatctgctttgtttccccaaccttcagcttgaaccccaatatctgtctctgggtcttttatttttttgtgttacaatctactgatgtttcagcccttggcccaatgggaattttacataccaggccaaatctgcctcctgctgctgttaccaaatgtagtctttaactaaatctctatttttctgttcatcaataagactcagcaatcaaaggctggggtgaaaacctgctagctcagagaggttgagaagcaactagctgaccttcctgaaaggtttctatagccccatattaagtttctcctctgatgtaattaatcagatcaggccaaattaataaatccaagcttaatctgagcaagcattcctgggtggtcccagagaaagaagagaaaccatgagggaaaaccatgaggagtgaactttaactctgggggcatggagctgccaatgacaagctttctcaggggtgggttctggaatgggaggagtagggctgagtggagcttcccaacactttcatatttgcaggtatctcagaaagagagcatctttgtgtttcaccacactcaaagtgcctccctactattgcctttgagtctctttcagtcttccagactccctctgactctctctggttactttctgtcaagtagctgtcagctctgcctcttgactcaaggttgattttatttaattaacgcaaatgcaaactggtgtgattgaatatccttcaaggatcttctcatcttcccaatacattgcagttgtgtgaggagggaggtatttctgtggcatgcaatagttatgagattctagccagagggatccagttgtagttttagaactttttcctatcactgggtggtggtggttctcgcctttaaccccagcatttgggaggcagtggcaggcagatctcagtgagttagaggccagcctagtctacaacacaagttccaggacagctaggactgttacacagagaaaccctgtctcaaaaaacaaaacaagccaaaacagaaggaaacaaaatttctttctttctttacacactgactgcagtttcctctccccactctcccaccagtcccttccctccacctcccctctgctgcaccctccattcacccttatttgtttctattcagaaaagggcaggcttcccacggatatcgacaaagacaaagcatgacatatcaagtttcagtaagcacttaccgtacaaggttgtgatgacactaccccaggctacccggtaagaggaatagggtcgcaaaagcctgaagaagagtcagagtcagcccctgctcccactgttagtcccacaaggacaccaagctacacaactgtcatgagggcagtccaatgcaggctccctggttgttagtgtctgtgagcccctatgagcccaggctagatgattctgtgggttttcttgacccctctgactcttgcctcctatgcaggattccaccagctctgcttaatgtttggctgtgtgtttcctcatctgtttccatcatttgctggatgaaagcttctctgatgacaacagggtgaaacaaacaccaatcatgtttgtctttctgggtctggggttacctcacatagaattatttttttctagttccattcatttgccttcaaattgtatgatgtccatgtttttaacagctctattgtgtaaatgtaccacattttctttttccattctttggttgaggggcatctaggttatttccaatttctggctattgcaaatacgatgttaagaatatagttgagcaagtgtccttgtggtatgattgagcatcctttgggtatatagccaagagtggtatagctgggtcttgaagtagatcgattctcagttttctgagaaatcactgtattgacttccaaagtggctgtacaagcttgcattcccaccagcaatggaggagtgttctgcttgctccatatcctctccaaaaattgtatttttgatcttagccattctgacaggtatgagatgggacctcagagtcattttgatttgaatttccacgatggcgagggtgttgaacatttctttaagtgttcttggccatttaagattcttctgttgagaattctgtgtttagatctgaatcccatttttttaaattgtattatctggtttaattggatgttggtgtgtagaagaatgcaaatagttccatatatattgatctacacaaaactcaagtccaagtggatcaaagacctcaacataaatcccatcacactgaacctgatagaagagaaaatgtgaagtagccttgaacccattggcacagaagacaatttcctgaatagcacaccagcagcacagacactgagatcaacaattcataaatgggacctcatgaaactgaaaagcttctgtaaggcaaagggcagtgtcagtaggacaaaatggcagcctgcagaatgggaaaagatattcaccaatcccacatctgacagagggctaattttcaaaatacataaagaacttaagaaactagacattacaatattaactgcaattttttaaaaagtaataagttttttttaaataataagttaaattaggattatttgcttgtcatgtaggtgtttatttatagcagcaatttatcaatagctatgttggcaaaggaagaatcttcccctcccctttctgtttcttgttggccaaatatttttaaaaaattatatcatctggctggagaggtggcttggtggttaaaagcacttattgctcttgcaaatgacccaggattgattcccagaacccacatggtggttcacaagcatctgtaactccagttccagggtatctaataccctcttctgacctctttgggcaccaagcacacatgaacacatatatacatgcagacaaaacactcatatgtaaaatgaataaatctaataaaatttaaaagaaaattccatcatctctctgtcatccttttttttgtcatggtttttctcaggatcatggtggcagcaaagatatattattatatgcattttttactgttgatatttctccaaatctatcttagagcattttttatgcttttattgttttgtgaggcctgagataaagaaagcccacatgttagtctgaaccagggtgacacattaatactttttactgtttcttgttacccatcactgtggatatttatgaaatattaattcagttaaagtgcacagaaattttataatttccccgtgctgagcattgaatttggtgaaacactaacagcacactgaaggtgttctgtgccaggccacaactgtcgcattatggtttttcaacttaatcaagacaaagaaattctttgtgactagtccctttgcttttacttttgaataagccccagggatgagaagtcaaacacatttattgggccttgtaaatcagtgatattaaaagcaacattatctattagcactcaaggtgttgggaggatggggatcagctggagtccttgcctctccctgtatggttctgggttaaaatcctcgaaggtgctaaaactgaacttccccagtggatgctcatccatgcagcattgctcctacatactagatgctttgaaccgaacattgctggattcatgcttttgctatggtatatgataagctaaagccgattaaaatttcctgtttgcctctttacaaagtgcagctgtctatgctatttaaataaaatttgctcatatgatgatataacactgggtgaaaactgggtttagttttggcactactgcttctgggtgtgtgataccttggttttcctgaggcactgcattttcatattcagtgggtctcacactccctcactaacagtggggataacacctacttgggtgggagtgacaataagttaatgaggaacaaatcctggcatgcctctctggttggtacagtactgcgtaaatgtaaacagcacttctacaaatagtgtttcagttcattaaaaaagtgcctactgggctgaagtacttagtgagagcaagcacttctttgaacaaacagcagccgtggaaactcatgctctctgcctcctacacagatcagaaggaaggcacttattagatattttgtgcacacttctgccttggagatggttaagattttggcctaatataggttctaatcttcccaaagcccctactgactcatttcctgatctccaagttcagtgtaggcaagctgctgcacccgactgctcatcttgtgaggttactgcgtttaggaggttgttgacatgtgtctgcctaaacagttgcctctctcaagggtgccggcattttttcttagagaattttaattttctatgacgtcaaggctctcaggcatcttaacggatgttattccgggcctttcagaaggcaatccctctgagctttccttgtctgttctgggcttggatatctgacactgaagagatttaacacctaacgtcagtgacagctctttggaggacagacagactcaaagccattctcaaggattcttcttttatttctaaaataccttttgaccgcagcaaaggcagctgaacttgccttttgtttcttttaatgtgttcacagcagaactggggagggaaagagtatcacagccccagccttttcttttctttctttttttccttctacttgaaagactcctttgttccacctccagttactggtctggagaaagttacaaaagatcaagggggaaagaaaaggctggttacttctgtgttctcagcctggcaggctgtagctacacaggcatttacagattggaagaagcagataccagccttattcctgcagcctaatggctttatcatgactatattagtgttgccactgggttctcgagtcaactgggagtgaaggtttcacttgacttaagctgacgctagaaacacacaataccagagttggctggcagctgtggttgggtttaattagagtaagtggaaagtggatcagctgttttcactacacaatctccaacctgcttttttatttctggaatgttttctctgggagataaaactgcaaatcaagtcaaatgatgtacttagatgcttagattttacttattgattgattgatgttgcttagtttagggtttttagtcttttggtcttaattaaaaactattctttttcattttaactaattaacttatggggggcacatatgtgtcacacagtgcacatgaagactaggggacagctttgggagtcacttttctgcttttaccttgaggctctctattgtttctagctgcgtgattcaggccaactggtccatgagcatctgtgcagtttttcaggctcctatatcactgtaaggatgctggtattacagatgtgtgccaccacatcaatgtttcttacctgggtttcagggattgaacttggatcatcaagcttgtgtggcaaatacttttattggctgagctatctatcttactggccctacccctggtgtctgtctgtctgtctgtctgtctgtctgtctgtctgtctgagcctcattatataatccaggctgggtttaaactcatgatccttctgcctcagcccccagagtgctgggattatagacatggcaccactatgcctcacttttatttgttgtttaattttttttcacttctggggatcaattacttgttgattggttggttgattagtttctcgagagagggttttacactataactcaggctagattggtacttgatgtatagctcaagatggccttgaactcacagtagtcctgctgcctcagcctcccaagtgctgattatagattgattataaatgattatagcttgaactccttggctacttctgtattgtgatagcagtccaggctctgactgtttttatagttgcatgttgataagttttccaaacttagaaactaaaatacatgaccaagatgttaagtctgcaaataactctagttaagagaaatgacaagccaagtgggaaactagtggctaatagctagaaaaatttattattgagttattcattagtattctatgtgaggtataataacttattaatataaataagactagctttggtttaaccctacaattccacattacacatagtaaaattacaaattgagtagtttacatgcacttatgtttttggtttgttttttagcagtttccagagtgagtgattggtcttaggtgaaagaatgaacaaaatgaggccatgagatttggggctagagatcaggtgttcagctttgacaggatgaatctaagtggccaaggtccattggctataccttatcatttattggtgataagcctctgttaaatgggttaaggggtccgtgggggatgataatgaagactctgggaaagaatggagccagttagaaggatgggactaggataacagtgagtgatctagaactctggagaatttaaacactgcatttaatggtaaactctagaaaaaatatccttaagaaaaaggaaagatgtgttagatacaccgtttaacacaaatgcccaactgactcttaagagagtgtcagcttgatccttctaagtgtgatgatttctggaaggaggggatcatgatgcaccccacttgtactttcgactctcagtacttctcagtaagagaagccataataccacacgaggtttaacactagctcatccttaccaggggtgccaagtcccgtgtttatagatactttcctagtagaaagaaaagtagtttaagagaatgtgggatctggttctaattcctcagtccagttttgagagcttatcatgttatgacccacttctataaatatgcatgagggcacctcttacaaagcttgcactttttgcaaagtagacatcataatttctgacccattttatggttaatattttgatagtattgtcttcaaactgggtggtaattatcaatgatcttaggcatcttggtaaaatattacaaaaagcaagattggcttcttgtttatttatttttaaaaatatttttagtattttatgcacccccttttatcttgcaaatattttctagtttctgaccatcaaccaaatctgagtcaacgtgaacaggccacaaagaggggaaaagattggtcccgaaattccatgttttgcaagatactgaaacagcaatttgacgtaatgtctagtgcatttttttttaaaaaaactaattatttttcatctgaaagccttgaagtaaaacatctgtttttacaggtgagaaaggccctcctctgtagggcattatggaaggcctagagaaatttagctgattcaaggtactttatcagtgcagactaatgattgatcttgtgtcaggagatgagaacatcacatgtgttcctcttcctcctaatgaaataatcttgggaggacactacagctcttgggactggcttttctttcttttttttctgctttgttttgctttgttgccattcctgacaactgctttgctttgcaattccaacccgtcttccatgacttcattccttatgggcatcatagatgctcagttaaccaacattcattcattactgtagtgatgcaaccacctccttcccccagaaaagggtggtgatgatacttgttacaggtaattagcaaccagcttgtgtttcatatttgtgctggcaaatttgtcagttttccattgccatattaagatgccagagtctagttcctttatataaacaatggagatatatttagctcacaatttgggagtgcaagtgcttggtacctgccctggtcaaagcctcatgggagatggtatcatgcacttgagaagcagtgttcacgtgacaagacaggaagacatagtgtgactcagaggtcagccatgcttcttgtagtaacttcagttacaactactaactcactccacaaactcttgaagaataaatctttcaaggacactatcccaaatgccatgagttctgctgtcatttctttagcactgtcacattgttggctaagttttcaaaacacaaaccttgatcagacatgctcaagctgtgtctagactgcagtattaggagttagagccgaatagctcaatggttaagaaatcttgcagaggtttagaattcagttcccagtccccacatcaagtagctcagaactgcctctgactcctcctctaggggatccaatgcccttgcccagggcagctgaatacatatgaacacacacacacacacacacacacacacacacacacacacacacacagagagagagagagagagagagagagagagagagagagagagagagagagagagagagaacaagagtcagggagttttttcccagtctgtttatgactgttgtattttctatgtaatatatagatcattaaatagtatgaaagctgaagaaatataaatacgaaaagaaaaagatctattttttatgagttaataaattttcgggtagaatctataaaagagagtgctgtgtaataaagcacaaggaagacaccatataattaggagacatcaaaatatgcagagcagtttatctccatgtttctcaccagctgagtgactgtaccttcttgttccattaaaaataaaaaataaaaaaaggaaactggaggccagcggtgattctttattggggaaagcagccaagtggaaagccagtcagactggaagggatgccctgctaccaagatgaactaaggcattcacaaggaagtgatgatgcaaaaataagctacctagatgtacatttataattttcctcactttccctctttgtgaactgactctttcccaggcttcattgcatctgctcatgggaattttgttctgaattgccagagagctcaggactggacttctcttaatatcagcagggcgcactgtgctcatggatgctgtgactaagatcctgagaacttcacttagccatgtgtttgaggcatttattatttatttataaaaataaatattatatttattaaagggtaattatagcataggacaatatcagtttctggatttgaatcctgcttctatttctgactgattcctcactgccgaacaacttttaacacagaaacttacaataataatgatgctagctccttaggctaagaagatcaactgttcataaaacaaagtatagtacccagttatagcagaaatgacaggtagggtatttctgtttttcctttaaagtatttttttaaggaattctgtgtccccagtgacttaatataatgctggactctggaaattgttggatgaaagaggttgaactttgtaccccttctgagggtagctaaggcaaattggagaggacccaggaacaataggatcctgtaattagattacatggtggccagaggtcaaaatgcaggagcaagcagaacttttagtcaagggtcagtgatcaagcacaggctgagcttagtggtattctctgtgaagactctgagggatcctaggagaaaagagagtgccggaggccatgagtcctgctcctgaataacagctggccagaatagtgctgttatctgcagcttactctgcacagcttggagaattgagcctctgaagccgaaatcacatctgccactcctgtcttcaaacccctagagaggcttaggagccaaactttgagaaaagggcccaggaatctctgcatttaccagagccctcacttactctcctccagataccactggccctcttgttactctttaaaaaaattattattattattatcatcatcatcatcattatagttttgcaattatttattcaggtgaagggtacatgtgtggaggtcgcaggacaactcgtgggaatgaattttctctttcgccatgtgggtcctgaaaattaggcttggtggcgggtgcctttccccaacttggccatctctctaacccctcattggtatcctttcttcctttctctttatacaaagatttattagttttattttatggctatgggtgtttttgtctgcatgtgtgcctgtgcatcatatatgccatccccgtggaggtcggaggagctcactggatcccttggctctggagttactgatggttgtgagctgccatgtgggtgctgggaactgtatgtgtgtacttggtcttctgcaagagtaacaatcaatcttaagggctgagccatctttctgccctctcactggtatttaaagaaaaagagaaagtctttcactttcttgtcctgtgtctccagaaggccataacacccacagctacttgcccttgtcttaaactcttggtgctagtctcacttgcccagtaaagcctacttcagtccccacccgcccccattctctgctcagctttctcatttttttatgatatgtgaatttagttttcttatctgcctatttgctagacagtaagttttcctagggcaaagaaccataactattttgttcattaatgtgtctaggagcccaagacagttcttggcacatgatttcattaaatggcagaaggaacaaatgagctgaagaaccaggaccagcctggactgaagacagcccggagcatttatggtccctagttgatcacttgccaatggagggcaatgaactgttcagaacagcacagctttctgacttcagctagtttgacagtctcttctttccctaggtcatggtattttcccaatttttatggccttagattagggcttatttaggcaaagaaagccagggagctgtggataagacttagatgatccaggtaataaaaatgtctttgcttcaattttgtgacaaagaagaataccctattgaaggcccttgctcctcctctctgcttgtctgtagtttggtttaatgattacctcatgattcagcagtcattacttttctttgattctttcaactcttgtaatttctgaccttctcctaggtagattcatttttgtcattaactatttgttgcccccccccattgggatttaaatgcttccagttttcaaaaagtgttagtgttccttacatataaatactaaccattaaattatttagattgatttgggggtccatatgatctacctaggtctgacttactagtgtctgacatagttccactaaccttcgcttccaccttgaaggcaggattttgaactcagtaaatttattacaatctcttcagcatacatgtaatcattggagcagccccttaaaaatcatgggaagtaagtggtgatggattcctgagtcacacctcaggtcacctaaaaattatcagtattttattaacttctgactcaagtccagaatgctagctattaacccgcgcatgccttggagtctatgtagtactgaacccatgttgccaggagcatgctgtagccttcgccaggcagctttactgcagaaactcaccagtttctatagcatttgacacatgtgttatcacccacaaaacaagcgagctctacctggagtttcttctatgcattgcagatgtttagatactgttcaaggagacctttgctcttttgtaggcagtattattaagtcatcttttggctctatgccagatttttttttttttttttttttttttttttggtcagggtttttttgtcctgaaactcacggtgtaaaactggctgtcctcgaactcagagatctgcctgcttggattaaaaagcatgcacctctatgactggttcagattaatttttgaaggaattagagacaactcatttggtcagtatatctaaggacaaagaataaaaagggcatctgaaagactgaaggcaaatgtctgatcatgtatcaacaaagttactagcttccccccgccccttttttcacttccttaaagaaaagaaaatagcatgactcaaaatcaagtaagtaaaagttcacagacccaagtccttatagtcaaatcaattggaaatgtccatcaattgccttgatgagggtttgacaaactatggcccttggccaaaacctttctgttatttgttttagtaaataaagttttattggaacatagccctgtgttctcttttacttactactttgagtgcctctacacaatggcagtggtgagtaatctcagtagagctggaggtagcaataacaaagaatttactagtggctctttgtagggaaaatgccttgactgccagctggattcccagcaagttattctaaatttttctaattagttttatatgaaatgaggaagtgataaaaccatgtgatcttactatctgtgaaatacattaaggatatttctcagttggactgttcacaaaataattcaggaacccaatgctatgagaagcatcaagccattgttagcctataaacctacacgcagaattattaaattgggcctgaatgtgtagctaccatctatatagggtcagaggaggcagacagtcacaagaagaactcttttattttttcttcctactatatttttatttttttctttttctttctttctttcctttttttttttttttttttttttttttttttttttttttttttttggtttttcgagacagggtttctctgtggctttggaggctgtcctggaaatagctcttgtagactaccaggctggtcttgaactcacagagatctgcctgcttctgcctcccaagtgctgggattaaaggcatgtgccaccactgcccagcttatttttatttcttaagagtatatatttttttgtctgcatatgtgtctgtgtaccacatgagtgcctgttgcccatggaagccagaagagagcattgcaaccccatggaactggagttacaggtggttgtgagctgccacgtggatgttgggaatcaaacctggggcatcttaaccactgagcaatctctccagccctgagaagtcttctcaaaggatgtgttcatcagatggttttatactaatgtcttagttagggttgctattgctgagatgaaacaccatgaacaagaagcaagttggagaagaaaggtttattgagcttacccttccacattgctgtccatcactggaggaagtcaggacaggaactcaaacagggcaggaacctggaggcaggagctgatacagaggccatgctgcttactggcttgccccaagtggcttgcctagctttatttttgggggaaccacccacaatgggttgggccctcccccatcaatcactaattaagaaaatgctctgcaggcttgcctgcagcccaatcttttggagccattttctcaatcgagatttcctcctctcagacgactatagtttgtgtcaagtggacatccgtctagtcagcacaattactatataaaggagaagtcagcttcgctagtatttgatgtataaattgatactagtttctgcacaaatgtaccatcaggcaagttatttgaaaaacctcaaagaaagagcagaaatcatatagtctctaactatcaggagtggaattcttgctgtcttgatttcagtgtgttgactctcactgaagcttgcacatacttagttaaatggtttggggaattcattgtctacttcactgaatagactacaaacactcctttaaaaagatctcaggttgaagataataattcatacactgcttcatcataaaaagatggtagaggcagtatttcttatcaccctttggtcctcagctgtgaaggaaggctcaaacatggactataaactccagtgaattgttgaattgtcacaataattatctgtgaaacggattcacatcttctgtcattgtagacttcaccctggttgaatattttgttgactttcagtaatttttgcataatcagaaagatttaaaaagagcactgctgtttgtagataaaaatgaaatccctttctgttgacatttgtgtatcatcaggaactaacattttagctgtgacaattgttaaagttaagaacagaaataatgagcacaatggcagactgaatcacaaggatttaaaaatataataaatctatagtgtttgcataagtcttaataatgctaatgagctttgaaagtaaaaatagtgaacattggggctgcagagagggcaccgaagttaagagtgcttactgctcttgcagaggactgggttcggttcccagcacccacatggaagctcacaactgtctataactccagttccaggggttcagatatttctgttggccttaaaaaacaccagacactcaaatgtgattatatatatatatatatatatatatatatatatatgcaagcaaatactcatacatataaaataattctaaaaattaaatatatagggagtatctttgaaaattagaaaatacaaattaaaaggactgttattttatattactatattttttttatttttcgtgacaggatttctctatgactttggaggctgcctggaactaactcttgtagaataggctggtcttgaactcacagagatctgcttgcctctgcctcccgagtgctgggattaaaggcatgtgccaccaactcccggcttactatatcatttttaaaaaaatctatttttggggatccagtgaaggggcttgccaccaagtctgactctcatatggtgaaagagacagctgattcccgtagttgtcatctacccccacctgcactacgacaagcacgtgcccatgcatgcacatgcacactatcttgcatgacttcattgtctgatgttttagttatttgtagtcaattcagtctgaaaacactaaataaaatgtctctatgtgttagttctgcggccttctgagtagcacagaaggatctcatgtcatcccatttgctctgccaagcttgcccatcacctccagtctagcagatagctgtttgtatgccaccagcctgtttcttccttagtagctgtcccaggcaccagatcatctggcgtcacagttctcctgctggaggaaccattgtgcagtagccaaacactgtggcacattgcctatgtcattcttctcttgtcctcttgtcccaaaggctccagccactcatatcattacaggggatgataaaatagtacagtataataagatgtttttgagacgtggactacattcatgtgaatttttgaataatttccccttataattgttctgtaagttgtggatttctcattgtgcctaatttgtaaattaaactttaggataggcaagctgtatcatcagaaaaacatattctatagtttggaattattgtggtctcaaagagcccttccaataagggaacctattttattccatattttcaactctcaaaagtcattcttattcacatattttttccaatctggtagcaaccatgatctcccatagtaccaatgctttctttcatccttcaacagctcaaattagtacttgattccagggaagtttagttttttctctgttgattttcacctttttgtttccctctgtcgattttcatctaaccacagagatttttccttttgaactggtttaagaagaaaatctccgaggcaatctttgctactagattgtccagaaagcctggcttcttatcagctttctcttgactccaggaagtcagtttcaaatgcaaatttcacaggctttacagggttccacaaatgtcaaaacgtctttcactccctcttgtccagcatcaaactgttgccaatgataattagaattcatgaagacagattggcacttgagacatgcatgagaacaatgtagggcacagaatagaaggactgtacatctcatgtttgtatagtctgtagtcctgtaaggatttcaggttctgagggaaactggcttgaactccccatatgctcagcgtgcatagtttacagaggaattcataaaaactgcttctgatgtgggctgaactccgatgtggtctcatgacttaagatgcattttcccctctaagcacaagtttaatcatgtcaattttatatagacaattaatggcttatgacaatttagaatagaaagtgttttagactttttgagatttggaacaattttagacataagaaatcattaatttgtgccataatatgtttcgcatgggaatgaagaggatgtgagccttaaatgtgtaaatctgttacaatgtacataaaatttcattacgttagtcagtaaatcccaggcagtcaagagtagctacaaaatcacacatattctatttgtatttcagctacctaaaacagtattttatttatgcttataatgtgccaggcatatactaagcctttgcataatcctctgaatagttttcaaaaaaattcattttaatgtgtccacatttgaggactcttccagtcctcgttagtagctgtgactcctaaccaggggtgtagtgtgacccatccttcttgagttggaaggtatcacttgaagaaaaatctacaggaatctcgtggtttaatttaaatttaaaattaaacctgagattgaagttacttttctcatagcgtacaaaattgtctgacaaaagcagtttatggagggaccaattgattttggctcctggtttgagaggatacagtaggggtacatggtagcaggatgatgacgtggttggcaacattgtatctgcagacataaagcagagaaatgaaccctgatgctcaattcatttgttttctcttttgtattcagtctggaaccccaacccttagaggcatgtttctatggtgattctaaataaaagttaaattgacaagattaatcatggtacttggcttcagagccatgccgaaagccattatactcatgtttgtcatgtttctctaggcaaatatttttcaatggctatatgttgctgtggaacaatctttttgtacaatatatattaatattaagccactgagtggtaatttgcgagctgctggcacaggaagactccacctacaatatgttgagttaaattatggcctgttcagtggtaatactaagagatggaatgtgataagcagatcagtatttcctaccagatctctttctccacctagcaagtcttgatgtcctgttttgatcaaactgcagagcaacactctctgacaagctctacaggtgcagcatcccctggcattggacagtggtaggaagatgaagggcagttgtggaattgctgtatcagtgagatgttccagtaccagctgaaactcttaatcttagagggacactgaaaatggagttgattagatgttggagagctaggaaggatgaaggtgagatactgctctcttgaattagggaaacaaggaagttcacacatattctggtaggagtggcttccattgagagcctggtgactagagaaaacccgtaaactcattcctatgcaataaaaccatgccaagccctttatggaattcctggcttagtcctatgctgttctgtgttcccacagcacacagttaatataaagctacctcatttttttttacattgcattccttgggcagtagaactcaggtagcttgtaaaaactcagagagtgttagatttatgggtttcccttattagatactgattcaacaattgattaaacatcaacatatttatgaagcccctaatatgaacattatagcctatgtgatagaaagtactacccttggtgacagtcctatggaaataagacttgcacagcatcatctgtcacaacccttctgctctttcccacactcttcttttggatcatcgtcattgtctatgggtgaatatagcaaaatatatgtcagaattccagtctcgaggccctagtcctgggaaatctaggtccactgctgccttcccagtttggatcttctggaatcactgattttctcctgttgtctctggcccttctgctgttttctgttgagtagcacaggctttgaaggaaagcacaggaatgtaaagcaacctgttctctgatgaggaggaatgttttgtttagtcctcaaagctaccaagattcattcattcaagcctgttcagccatggtccgatagggcagtgattctcaacttgtgaatcacaacccctatggaggtctaatgaccctttcaggggagtgacctaagaccattggtaaacacagatatttacattatgattcatagcagtagcaaaattatagttaggaagtagcaacaaaaataattttatggttgggggtcactacagcatgaagacctgtattaaagctcacagcattaggaaggttgagaaccattgttatagggcaattgccaaatcagaatatatccaggtatttttcatttttctgcgtctttcccacttgtaaagaaaaaattcaatttctccagtggggtctcatgggtcatattaaccacacttcaggggagggcccatgcccaacgggagatgaccaatgtagacaattctcaaggatatttttgtagacttttggtcccacacagtcttttgtgggtattttctgtctcattagccttttgcttatatagtgtggtttcagattttgtgtatgtatctggatgagtttcttccttcctgcctttctttttgtttgcttaccatttttatttaaacacagagagaaaaaagggctttgagttggggagtaggagagttggggaggatgtgggaagcactgagggaggggaaacattagaatatattgtataaaaaatttttaattaaaatttaatgaacaaacaaataaagaagtgagtcttcttaacttggctgtatttcaacaagacccacccacacatggttaggagaaaggatgtttattttcttgggtctaaaagacacaaaagtctaaaataatgaatgtctctccacttttccttttttagggcatgggatagatgtcttatattcccccttgataagttatctacttcatgcttaggagaaattctaatatagaataaaagcttcaacacacatggacttaccagctggtctgctacatcaaggatacatagaatgagactttgggtttactaattgttctctaacaaagcaaagagtgcccttttacgttataatctaaatataaaatcctgtgttttattatttacttttcagtttttaaatgtccggaaagattgtctagaggaagcactgccaaggacctcataaagtgacacccgaggaagccaaacccactgttctccattgaaagcaggcagcctttcgcagccctttgatatcctgtcactgcggtgatttggcagtaactttggcagggtgaatggagtggaggtggaaaaaaaacctcctttgtgcggtgacacttggctgggattactccacagaattttatgcctggaactaaatgaaattgtccaccattatgctaataggcatggccatgcagtaaagtatctctgcagtgctgggctgatctcacttatgctctgtgtccagaagtcttccaggaataaaaggtaatgattgctctgggatgatctgaggcccttctctacctactggtctcagttgggagtgtcaaataacagtgacactcattagtcacgatctgaatattctgttttcatggatgctgcctgtagatggggaagttcgtttcctctctgcttcctttgagtctagccttacaaagttgatgagggtgtggtgttccttgtcaagtcccaaacacctgctttgcagcgacactctccacgctgttgtctgctgtgattcaagcctcaatgttaacactaatttactgaataaaatgatttcatcttcacattgtcaactgaaactcactgaaacatgtatgtcatatagactatctcaacccaaagctcttagtctgaagttgaccttaaaagcaagcaagcaagcaaacagcatatagttctggatctgtgctcattgcctcagcctcagaaaattagggctaaaaatctgtcagtgctcgtgggttaagagcagttgttgtttttgcagaggcctggggtttggtacccagcactcacatagcagatcacagctttatttaactccagttccagaggatttgataccctcttttgacctccacagggcactgtatgcaggtggtgtacatacatacatgtgatgggggatgtccttctgtatgctatgaatatatgtttctcttattggctgatgaataaagctgttttggccaatggataggcagaactcagctaggcaggaatttggaacaaagaagtcagggaaagaaagacaaaaaagagatgccatgtagcagctgaggagtaaagaggcccagacatcaccagcaagcaaaggcaacatgaagatacacagattaacagaaatgggttataattaagagagagatagccaataagaagcctaagccattggctagacaattgtaactgatatttagtcttaaaatggttgtttcatttcgaggtttcgggacccgattggagaggaaactggtctactgggatggagatagatggagaaaatctccttctacatacatgcaggtaaaacactcagccacataaaatagaagtaaataaatgaaaaaaatatgtcttcacagtgttccatgtacttttatttatttatttatttttagtgatgatgttctgagttttacctgggtaccagaggcattaattgtacacaaacaaaacaaaatacccccccccccacacacacacactcctgtcatttttttccttagtatactttaaaagtgaactgttttcatggaggggggctggtgtctgagagataacttaatggctaagaatgctcacacactattcttacagaggatgtgcatgcagtttccagtgttctctgcctgctgctttcgatctcccattactccagcaccagggaactggatccttttggcttctgtgtgtatccccacacatgtggcagacttttaaacacacgcgcgcacgcacacgcacgcacacacacacacacagacaccacatacatacacgcacaggcacacatacacacggataataaaaataaataaatcatagaaacagaacaacaacaacaatgaaaccctttgtgttagaaggatcctaatgtgtaaaacagtatgggtgtgagttggtatatacggtacatgctgcgccctaaaggaattcatttgcaacatatttaaggtccattgatgcttctgagttccacagagcacagatgctagtatgtgctgagtgcacgtcactggatctgaacaggaagcattcaatctcaggtgggaggggagaactggagatggggggagcaagaggggaggaagaggttgggggagcaggaaagcacataagccacctagtagcttggttagatcatgacaggtggctgttgattaggacaggcatataactcacctgggtgccatagtggaaatgtcatgccttattttaggaaattagattcaggctgggagacatactttcgggacaaactaatattctagtaacatattttaattgcgcttcttactaacaagagcaattttcaagttttcttttgacaaagactaagataaaaataaaatgatactaaaacaaagaaggttagtgaaaaattgtataaaccacataaaatctgataagggattataggacatgtgtcctcccataaattttgtaaaatggtacttaagaaaataagttaaaattttaattagggataaacaaatctatagaaaaataaaataaaccccgggtggtttgcagctaggggtggcagtgaggactcagtaacatcacagagagatgtatttagggtgacaaacatgttccccatctggattgtggtaaaagttgcttaactgtataagttaataaagatcattggactgaacacttagcaatgtgtgagttttataacataaattatacctcataaagttcattttaaaaattagccagctgcagcttcatgccattgaatttataaataagttcttggaagtggctcagaagcacagccaacgacaacaatagatcattggactgcattagaaagaagaatttcttatttcttaaaacgtgattgacacagtgaaacccgtagagtgggaaaatttttgaaaatcatgtatccaataaggttttatcacacacacacacacacacacacgcacgcacgcacgcacgcacgcacgcacgcacgcacgcacgcacacacacacacacacactttggtagtgagcctagcctttccatctttccatttcaatatgcacatatataaagaacatctatgagtcaataacaacagaaaatccaattgaaagttgttcaaaggatgtaaataggcatttctttagttacaactacagaaaagtttcaagtctaaaagctgtagaactgttttcatttgtaatttgaattttcccttcctctcataggacatgtagtgtttaaagggtatttccagttgactcagaaaaagagtattttccaattgagtgaagcaggaagaacaggataaatgacttcactcttgctcgactgtaacttactaagttgttgtggccctggatttcttcatctgtgacattaaggacttgtaacttcaaattcttaaaaataaaattaagctccaaaactctttaaaattgaatatattgagaaagctgcttttgcaaggtggatgttgatataccttttagattcataaatatgaaaggaaatagaatccagaggcaaagcaatttctacttacatgtgtcattgttctttggctgtatctctattgtaattggcatgactttacattctgatctatagtcacatgctgatatctccttgttaattactacagcttcaatttgagggaatactggggacacttaaccagagagccacactgctaaccctaaagtttaaatcctttaaggaaatgattccattttccaaatgcttcctttctgagttccttctcctctgtcctttcttgttccctgtttttctccttgaaacaaggcagttggaaaccactttgaaggtgaatggaagtcactaacttgaaggacccagaccttttctctgacttgacttgttatatagacttttctcaagagttgtttgtggtttgcgtttcttacagtcctaaaatactacacttctgctactgggctttgcttataagtactttctcaactctcatggcaattttttaaggtcaatattaatgttattttcaagactgagaaatgaagagggatcgagagattgacccaaggccactcatctactgaggagacaatgagagtccatgttgtttacatccaccccaaagtccaattccacgtggtagagatgtttagttagagctaagaactgcttcatcatcaagtaaactgatttttggtttcatagaacataacatcaataatttgcaataaaaccacgtgtcccatagtcagtttggttggaccctgacttttagcagctgttgtgtgatagcatataacactgaagtctttccttgagttcatcatcttggtgcccacatagagtcagaagcagttgcagatgagattgctctgttcttaagcaacagatagtttcagtgagagaaaaaggaagccatctttaatataaggatctagcacaacagctgattgacccattctgaatgagcagctattttcaatgtgcatcccataatgactcccaattctcataacactgaaaaacctttcgacaaaaggctacacggcaaaatgaagtgtgttgcttgtgaggcaggaaagcgacacgggcatagcacactgtcttattttgtgacaccggcatagtacactgtcttatttgtggctgtggagtgtttctgctgtatcctgtgcattctgaacccacagtaactgggcatttgaacattatatgtatcttgctccttgaagaccaattgtctgctgtcctttgcatctcattacaggtcagaacagaagctatgggactggtcaaggaagctcctgtctacacatatgttctcctcatgttcaggttcatagttgttttattagaatggtcagtttactctgccatgacagttgatattgtggaataaggaagtatgatatacactatcagaatcaacccatttactcttctcccatgtaaacctaatgggctggaggagggagagaagaattgtaaaaaaaaatatatatatacactggggaggctgttattgtagacataccctgctcactgcctgctacagagtgactgcttgcctcacacagctgagggaactcacttctctctgagctattttatttctgcccctatgactcaaacactctgattctagtatttatggagaatgaacttttgcattatagaccattaattccttacttatcagtaaatatatgtaagcttttggtttagagaaagtttttagtgtttaaaaatttccctagtagacttcatacttgataagttgataaaaatcttattttaaaatccatatcgtgtaccgtgagtttctatttaatgtcattccatttcttttctgagacatagtatcacctgtagcccaggctgacctggagatcactctgcagccagcctagcctctgaacttttggtgattcctttgccaaatgttataactcatcatacctatcaatcatcacagtgaatgatatccaaattattatagtttaagcatgcaaaataataaatagctaaaggaaagaagtcaagaatttttcatgttatttccaaggatgatggaaattggacaaattccgtttccagatctctcactgtggagaatgaggacggcccatggactaatcagtttgcagcagtacatgtgtgtctgcatatctgcagataaaactgtagaccacagctcctgagtggctggctattttcatatccgtgatttcatttcttagcatggtgttttataaaagttaacttgctgcaaatatttataagttggcaaatgacatttccctgtggaatttttataatcttttaaaatgagaaaatgttagcactaggcttataaactccatgtgaaaaatgactggagcttacgaggatagaagtgagaggggcccagactctccaattgccttgccttcctgtacacgacttgcctgttccctgtagataattaggttggaagaaaactctctgggaggagcttttaatgtggtctgtggatagtggcttcttgtaaagaagtattggatgtatctgtcaggttctgaatgctaatgtatggaagacggctgatttgagggctccagtagtctggatctttgagactagtggaaattaatggtcacactgggaaaggcagaaacaggttctcaagtcctgagagtggtaaagacatcgggaggcatttcatgaacacataggaggggacttgtaagatttctgttttcctggaaagcagcttgaaatcatccattcttaattttcatttgttttatttactcattttaattgatgttcataagtaatgaaactctgttggttttattataatttatggaaactgccaaaatgggcataatgaggtcatagctattaactaaagttttcattcattttacataaaatttattccttggactcagaatacagcctttgtttgccttctctcctgtttttacctctgagaacaaagtttacgaaaatgtcctcagatgacatttgtttattttcacaaagcagtattatacataaaagtgtgtgtcaatcagcaggctcagatactttgcttggttttcgtgaaaaaacaaacaaaataactaagagactgtctagcaatcaccctggccttgactgactggcagacctgctttcattcagcaatgagtatttggttttcaattccttcagttattacaatgtctgaatcaatcaagcaatcttgaacattggaaattgttctcttggagatgtggctatctgagcgcctgtacttccattgctatggagctgtgagacagattcatttcagaaagttgagctctcgggctcttcttacctgatgacagtctgaaaaacttgacttcagatctgcaaaggatgtcaccacttcaaagaagtataatcctgtctttgatccacttctccagcctctaggaggaagtgtgtgagcgagtaggggcatcaggcatggagaaattagcttttgggaaggtgaggtgagctggaacaaggaagggcttgtctctttaattaaattctcagcttctctgctgctcttccacctttggtttctacctttcagggtatgagagggcagatgtgggtgacttagggtttaagggagccagacctgggaactgatactgttgtctgactctgccaaagccattctgatcttgggtcatgacctcaaacaggaagtgcctctaagttcctccaaatatggtatgtgaatgagggggtggagtttagcacacaccagcccagctgccagcctttcatgtttacaagggatcaagaattggtcacttaaggtcaggaatatatcctttcttctgcccccaaggagcatacaatatatagtattacagactaggagaaatgctgacttcaactccagagttctagtttttcttaatgttgcccaaacctgttctgtaacttaggaacttcaaagagctccacagagtggcttacactcagctctgatgtagtacactcaacccagtgtctgatgagggttctagagggaaatttaaagccactttaaacactgttcgtttctgaggtaccattaatatctgagcagaaataggtgtttgaaccgagtaggaggaaaatcctagaaaacagggtggaaggttgtttaagagggcacatctggccttccttctgcaggtaccagcgtgaatgaccagctcactctgagtccttctttctgacctgattaaatttctctccttcggagattttgctgcttcaggaaactaatagagacttgcactacctccttaccagacctggtttccctagttgtcagtggtcacagtatctggtataaaagtcacctcacactgtaaggaaacactgtccccagctcactgtcagggaacgtgtacagcagagctacagtctatcgtgttcctgttggcatccatcagcctagctctctgcacgcacatctagggatgctgacgatgtttctctggtgaggagactcggagaaggaacacagggggatgctccctcttcattctcctttccatcaatttcagcaagtgttgatcccgtaaattatttatgtgagcagtgggcgctgcctccccaggtgcaaagcaatctgtttgaggtttgctatcaaaccgctatcgccctgctgaatgggggaggagtcaacacataataggagttatatatgatattttagaaacaggagtcttgggtttacacatggaaatgagctcttgacgaagtacattggaaacagaaagaggaaacctggtttcacaatcaaacagaaaaggacaaaagaagctggactggagatctgaagcgagcctttgaggttaagaagggctccagctgaggggaagcctggtcccagccctcagttcgtttctcattgtcagtttgccgcagttttctgagtgggcagaggtaggtaaggaagggaaggaggatcgacaacggctgtgctgtggtaatctattggcaaagtctagcttccagggacaggcgggtatgacaataagtatgtttcccacattaataaattcaatgctcacgtcaaattcataagtgcaggaccatcgtttacctcactctacagtgaaggaaaccgaaaaagagtcgggctaagtgacatggtaaagtcatggagcttgccagaaagaagagccaggtgatattgttagctgtagacggctctcttcgcacacaccaacttcctcgcacacaccgacttctgaaagacttgagttccgagtttcacacctgcctgggatgcttcttacgatgaagtttccagctagtgtcggagtatctccaggaatgtgccttgagaattcatgtccatcaactctgttttacaaaccgaggttggagaattgcggacctacagaggggggaagaaagatggacagaagtgctttttgttttcagggcacagtaaaactccattaaactctctctgtctctctctctgtctctctgtctctgtctctgtctctctctgtctctctctctctctgtctctctctctctctctctgtctgtctctgtctctctctctctttctctctctctgtctctctgtctctctctgtctctctgtctctctctgtctctctctgtctctctgtctctctgtctctctgtctgtctctgtctctctctctctttctctctctctgtctctctgtctctctctgtctctctgtctctctctgtctctctctgtctctctgtctctctgtctctctgtctctctgtctctctgtctctctgtctctctgtctctctgtctctctctctctctctctctctgtctctctgtctctgtctctctctgtctctctctctctgtctctctctctctctgtctctctgtctctctctctctgtctctctgtctctctgtctctctgtctctctgtctctctctctctctctctcacacacacacacacacacacacacacacacacacacacacacacgcacacatatgattatgtcattttcaggcatacttttgcttcttcatttccacatgggtgatgtcttttatttattttcttatgtagttgccttagttggaacacttaggtcaatgttgaaatggaatgaaagtgaacatcccgtcctgtttctagtcttctgtcttttgaagacaggatctgagatgaccatggttagcatcctggagactctcttttgaaagccacagtttggcatcttcttttactaacctagattctactgagaaagacttatataccagaaacaggagattcacttctaattcttctagtttgtacactcggtcttcccaatatcatgtattagggttcctttgaacccctaatgaatgaagggaagtcttcatctattgaaactgaatgtgaggactagtaagtcagtggtcttctccccatgaaggcctaatgaaattgcacaaggaacatttcctaattatacatcatagtgagcactgagtcaggatacggctgcttttaaaagttcctaggccattgcaatctactgtctggctaagaagagctgtagtgtagaagcccagatcaagaggtaattgtgatttccgagttttgtcaagatccccacaaatagaaacttaccttgatgaaaaaaaaaaggctatgattgcttaaattactcctaaactagttgctttaaaccaaacatcaacaatgctcacagagtctgaggttaggagtttaagcatagcttgcggtgataactttctctctgcactattatgatggaagttgaagttggggattacctaaattttcactcagggatagatggagttgattccagttatcagttggaacacttgctaaagctgctggctcagccaccactgtggagtttctgtatgggttccagcctttcccacgacatagcattttggttctaagggcaagaatccaaacaagtcagaagttatattaccctctggtatttagctttgagagtcagctatgtggcacttttttcttttcttttctttttttttttgtattagactcattagaaacaagtgggaaatgtggggcatagtcaagtgagaagggtcagattccatcatttgtatggacatgttggaatcatacatgtacctcaaacccatcccaggtactttagaagagtgatatgatagcaataattgggtacttatctgttgaagtcccttctgaatgcttcatgtgaactacctcagtcctctcacgcctgtgtcagctgctatcatcaattctatgctgtagactaggaatttttaaatttatatattgtctaaagcacaacttaactagaaaagactggtcatggattaaaacctaggcttactagtcccagaatgatattctcaattactaatatactaggatgagggagacgtggattccaattcagagtactaacgtggaagacaacacagcatgttccaagtggtttccttgcctaaggtcccgttcgacagtgatgactgctctcttcatcccacctctcctcctggttgctaggatggattcctcccggaacagccccatcctctgaaataactctcaggtcatgtctcagagctctgagacccactgcagacttgctgtgtgaacatcagaccctcagctccagagcaagactccaaagatagaagagcagaatgaaggagaaaataaagcagggaccggattctgcaaagagaagccctattaagagtttttttttttttttttttttaatggagagaaggaaaatagataagagtttatataaataggagtgaaggcagggaggatggaggtctaaagaagaaagatcataggtgtttgggtcaacttcgagcaggctgactaggtgtgcttttagggaccacagtgtttatttagcacttggtggggcttatctctgctgtcactgacatgctcaactcatgtgccctttaaataatggctcattctgtgaagccactgtagcttcctttctgctccttatgatattgatacccttcaccaattttgctacctgttgagtcctgtggtctttggtgggtcgtcctcctcatctgccttatttccttatgatgaattttggatcttttgacatccaagttcacttccggctccactgtttattactttaaaccttagcatgaggaggtcacaggaaatttccctgcattctttactatcaatccacctctccaaccacggtgacataaactggagactgttgtctcattgaagaatccaactgctgtgtcggcatgcaaataagctaggtggcatcttggcatctaccattcaggtttgcccaagctttaggccatgctttctgttgagacagctagagaccatgaacggattctatcttctcccatttctcaagaagtcttgtgtggtgatatatcattcatggtttatgaaagcctgcctgatgattcagaaagcaaagttagccacaagctatagaagccaggctgtggtagtatacacctttaatcccaccacttgggaggtagaggtagacagatctctgttagttcaaggccacattgagctacaaaacataaatccagtcctaaagagaaacagctcacacaaagatgatctcagcatttgggatcacatgcctttaatcccaggactccagaggtatttaagacgggaacagggagggtctcagagctggcattcattctccagcctcactgaagataggaaggcagtcagcatcaggattctctagccacatttgaggatcacctctttggtctgagctgaggtagaggtaagagctactggctggctgatttgcttctcttattttcagcctgaagctttagccccactatctgtctctgggttttttattttttgtactgcaaagagaatgaaataaggcatgagaagctacaaaccctagggggaactgaagtaaacagggaaaagtcggtttgggtgtggtcaggagtgactgtagctcacagttcaggaaagaagacgggaagtgagagttttacagattctgcacagaattctgtttcatccgagcaggaattacagtagaacagatcaccacttacatttcagtgacatgggagggttgcagacatagaatgtctgtgtgctcaggacctctgcccacagaacttccatcctcccattgcctataaaatcctatgagattttttccttttcttttgttttgtttttcaagttagggtttctccatgcatttctggctgtcttagaattctctctgtagatcaggttagccttgaattcatagagattcatttgcctttgtctctccagtgctgggattaaaggagtgtgccaccaccaccaggctatggttttggttttttaaggaagccataggcagaactccagataaaacatttggagacctgagagcccttctgtctctaatctaacttgttttatgactatgagccaaatcttacagatatgtttatgtcactagagttctgagtcagttaatggagatcctggactctactatctcagtttctcagtcagtcccctgccctaagccagaaatttagagaggtatccaggttaattcttttaggcctccggggagcagtctcatgtgtcacaaatgtatattaaactaaatagcatgcttgaattacgcttagagtgcagtaccagaaaggcattgaatggtatgaatggtacccaggagacctgaaagagttaatgggcctgcttggggtagggttgactggatgctaaaatataagataagacttgaaaagagaggactacaatagatttaccttgggaattctctaagtgatccattagtgtacacacagacacacagagacacatacacagtgagacacatacggacacacatacacataaagattcacagacccccctcctcccccataacacacacacacacacacacacacacacacacacacacatacacacacacacacacaccttggtattatgctactttctggactaggagaaacaaattgcatggagaaggagctttgaggtaccagatatagaaataaacataccttcacccctcaccccatcccttcctccctcctccaacccctctgtgtatctctctgatgatggagattgacctagggctttgtgcaatctactctacaactgagctgaaccctctaccctgccctgctccattggattttaggatcatatcattctctacacccttcatagaaagttcctttactaacctgtttgggaatgcataatctgaaacccaagatccaatgaataaacgccctctgtgagtggattaagaaacctagaataatctagattgcctagtaatcagcagataaggtcaaggttcctaaggcttgagagtcaaggagcctatctgattttaaccagtttttccctctagaataggaccttcccaggagcagctgtatcattatgacattttgtgctgtcagtttgaccctgtgaatgtggtgagctcaaggacaatcagatgtcctggtaaatttgaggacttttcagttaaagaggtggaacagctgcagaggcttgttatggcctgcagggttttccacgtcctcattctttgtgctcctcccttctattgccctatcctctgaaactcattgaatgaggattgctgaataaaatatttttcagataaaacataatggcgatatataatgatttacatgactgcattaaaaatccctttgagttaaagcatgtactatcaatgagaaactgaacagcactgaatttgttgccacatgcctgcaattcccagcacgtgggaggctgaagcagggagattgtgagctcaaaaatccagcccggggctgtagggatagttcagccattaaaggctaagctcacaaccaaaattccagcctgcactacttgatgagatcctgtctcaaaacaaaacaaaacaatacaaaaaaacaaaacaaaaactggagagtatacttttgtctgccaacatgaaacaaagtccatgatagattactaagattcaataaagataaagactttcagaaggagtaaatgaatactattcctcatttctctctatccagctctcccttcagtcccttccctcttctctctctttggcaacagttacttgtccagaagggaaggagaggtaaagtcacagtttaaaaagtattgaatcttatactgtgtgtcctaatttgctttttgccgctgtgatgaataccatgactagaagcaacatgaggagaattatttatttggctcccatcatctatcatcaaaggaagctgttgtgggatatttgtgcactgtgtgaagatgtatcactgcgatcagtttcataaagggctgaatggccaataaccaggcaggaagaggctaggtgggacttctgaggatagagaggattctgggaaaaaaaatggcagagtcaccagtcagacatagagagaaaacaggaggtacaagaaggaagagaggtaacaccacgtggcagaatggaaattaatataaatgaggtaatttaagttataagagctagttgagacaagagtaagctaaaggctgagctttcataatgaagaagaagtctccatgtcagtatttgggagctggctgtacaaagaaagacttgctacaggaagccaaagcaggaactgaagtagagaccttggcggaactctgttcactggcttgctcattcattgtagctcacccatcctgctttcttatagcacccggggccacctgtgcagtggtggcaccatccacagtgttctgtgccctcccaccctacatcagtcattaatcaagaaaatgaccacagacaatatgatggaggcaattcctcagttggagctctcttttccaaggtggctggtctggtagagatggtgatgttgacgaacactccgtaggagtgatgggagcttccatcctctgatgtcctgtcaaggtggtgatgggacacaccattcattgctgtcctgcttggagggtgttgggaagtttccatctattgctgtcctgccatgggggtggtgggaagctctagtgtaattatgttttgcagaggtgtgggtacagttcatgccatctgtcctggctctcaatgagccaaggtggagtcatcaccatttacacaccctaagcttttgcccatgatctttatctgcatgtcatttctcccttccccctccccccaccccacttttctcccattccactgcaaagtgtggcttctgtgctcttagcagttttagtctgtgtttctcatttggattccagtttgggcttatgttttggtttggttttattatgcacatcttatcacctcagagtagttccctgatttctagattctagtttttgccaaacatgatgctagatgcggagtgtttaatagtccactcttccatagttggttgattcttttctccttcagtattaagatgaaacactccttccccaaatgaatgctatagtgaccaaggatttaggggacttctcttgcttgtgtgcaaatgtcatacatagtgttgctgaagtcactgatttctgtggacctcagtctgcttatccggaatgcagggtggacatagggcagacagcagtgtgtgtgtgtgtgtgtgtgtgtgtgtgtgtgtgtgtgtgtgtgtgtgcgtgcaaaacaacatcagagtgttactggagattctaactgaaatagacaatgtatttagatccctggctcacacgtagaatacagtcatgtggaatactgtctagtgaaacaaagggggaagctaacatctctattttgccagtgcctctcatccccatcctccagagagaatactagtccctggactatgatagatccaggtcccggtagctagattgactgtgtgatttgtgagagcttggcctatgcttcctgattctctcaagcatatctcatatgagtagctatgagctgtattcataagtacttatttgtttctaagccccaatctgttggtacttcacttaaatgtataaccaatttatacatctatattgcctaaaaagaaaagtgccatgctttgtaaatattaaatattaggcttctcaagttttgaaacttcaccataattttatctttttttcaagataccttcttcagacaattattcagtcctgctatgccaataataaccaaaaaacaaactgggcaaaatcccccctaaggctcagacaatctgccgtcttttagtataattgacttagggctaagaagatcttaggaaatgcacaatacagaatagacattaaacactcagaaaacagagggaatttgaccagctgcaactttcgtagcactgaagtgatggctgttgaaacatctctgtcactgacagccaactggggagaggaggcagcagcgaccatctgtggggcaggtatctaaatttcaaggcaaccgggtggaagctgagaagcatgtccctgtccctttccacacagtgctagagaaaattcagggtgtggaagatggagggaaaggaattcaggttgcagatttaagatatttttggagtaaatgaagacattcccttctcatagtttactgttatgatgcccagttttgtttttattttgtttttaataatgcttgctttctatgtgcaactatatctaagactcctctgggttctaccttttcaggaaaactgatttctctgacagacttttgcttcagccaccattattcatcatattgacttaatgcgaagatgctgaatttcctaggaaacaatcacaccgtagaatcttcagcatgattcttgattcaaagagccttctaaattttcctgatacaaaatttaaattgtatggaagcatgaggaagcatgaggaaaatgggggtggtcttgaattttattagaccggcagaggcacagatgcatagcataatcactccagccacagtcaatttcagtgccaagcggggccagttggtgtttctaaggactccacgtgattgacagcttacagaaacttacccactgaggcatgaggcctcacacagggtggctgctcaagcttccagggtgcgaagaaatccctaaaaattcaagggggcagaaggactggcaacaccagggaggttcaaacactcccctaaaattgttctccagactcttcattgagttgccgagctcagcgtctgcaccaagtcctgttgccctgccatttgtcgataggctgcacctacattttgtctttaaaataaccactttcagcagttgctggctattaaaagcttttcagaaagagaaaatagcaccgctccacactgcaagtgctcccatgagtgtggcacacatagggggctccgtgtgctcacttggccaggtgtggctttgttcatgattcctacccatccttttattctgggaggtcatcccctcaaccctgggtgggtaagcaactgagacagtccatgactttcttttgttttcagtgaaataaaagctactaagtcacaggcagtttcaattcagtatctgccaccaactttcttcttgctagtctggtcctgtttcagtctgaagcctacagagggaaaagaggccagtgggtctcttctgcctgttcccttttctgctcacctttcctctaattaaatgcaaaggaggagagagagtgtgtgtgtgtgtgtaaaaggataggattattgttatttggctaggagttgttggctctctgaactggcagatggttactggtggctactctgagaaattctagctgtagggacaagtgacaaaaaaaaaaaaaaaaaaaaaggattcatttcaagggctcttttcttactcatttattccacataggaagtttattttgtctctattaagtgagctccatacatgaactagcagttcctcctcagtccttggttatttgaggtgagcattcagcctcgttctgctaaggtcaccttagacatgctatatttttgctcaggcaaacctggagagggtaatacaatcccagattccctcaggtggcctgtccagtctgccttagatgcatctaatgggaatcaggcagaaaaatcatttgttattcctaaccaaagcaacatatttttaattattttctactctgcaggcttcaggcgagaatgagatggagaagattgacaggtgatgggtggagactgaacgcatgtcagcacctctttctctaagcatccctggcctctaagatttgattttttattattcagctgctcaggggcctcaattgtcatacagagagttccttgggggcatttctttgtgaagacttcacagtgattacttttctttcttttctctatgtgtggcttttctttttttgctatcaattttttaaaactacatttttgcttatattatgtgtatgtgtatgaatacatattggtgcacaggtgccattggcatatgtatggaggtcagaagacagccatgggagttgattcatcctttccaccctgtggatcccagggactgaagtcaggttggcaggcttggcagcagtacctttacccactgagccatcttgctggctcaacaataatttctttgcagtccttttctttgtgtttggagcagaatgcatctgttttgaatgcaatctggtttggaagcatattaatcaacaaggaattccttctgttatcttgctactgctctttcacagtttgcagtgtacagacctatcattttagtttactatatctggatctggaatgacctccaaagtctcaagtgttaaagcctgggtcctcagcttggccctattggaagatggaaagcagctataagagatggatgtgcaggttggcggtggtcgtggggttgttaggccattgggtatagatggatgtgtggtggtagggaggggttcttaagccattgagggaatgctgtagaagggattgtgtgacaccagtcactgtggttcagccatccattgggaggttagattcctttgccatgtgctcctaaacgtggtgtgctgccttgccacaggtcctgaagcaaatcacccagccatgaaccaaaacttccaaaactgtgagccaaagtaaagccctcctctccagttttctcttgtgtctttctgctatatggtgtaatgtggtacaccctgtgcaacagagtcatttctctgcagagcaagagtaagtccctccaaacagatgttcccattcttctcagcttgtgataaaagactgtgtaaaggctgactgaggtgcccaagtccaggtggctttccctgtagttctttactccgatcttttcttttaaagatttcaataatcaaagctagtattgagccaagtttagaaaccttgtcagattaatttcatcatctgtctcatctcggtatttggtgatcactttcccattcatgttgtattttgtgttcttcataggcgatgtgattttttttattgtatcctgcacgttttgaatattctattaggagtctttccacagtttagacccatagagattggggtactttgttttacactgtgttagctaccttttggttactgtgataaaataccatgaccaagattttttttttttatatttctttatgtgcctatgcatgcagatgcccacagagaccagaaggaggggtggaaccccttaaactggagttacaggaggttgtgagctgcctcagtgagtgctgggaacagaacccagatcctctgcaagaggagtgagtactcctaactgctgattcatctctgtagcccctacttactttcatcttgaactcattagaagacttttctgtatttgtgatcatagtcatagcacttagcacacagtaggccatgaaggaacatttatttatggaatcattcaggactcctaatgcattagcttacccttaatgcacaccaattggctccacaagacaacttttaactttcatagcaatgctacccctgggagctcctaacattccaggactatttcaaatgaaggtcagtcctggggctatggatttggatttgggtaaacccgtgatgtcaaaacagatgaactctaagagacatgtcgtcatctgttctattgttagtttctgaccatcagcatttacaacgggcttggggtatagttcagctatagattaccttccatacagaaggccctgagtttgatctcagcactacaaaacaaaaacacaaacaaacaaacagaaagaaccaatttactgagtggcttttatgtgacgggcattttttgtttcttgtagactataagagaattacagataagtaaagcaaagttttgcgtcttgccatcaactccttcatacaaacctgaaacttaaggagttttcttgtgaagtcatgggactaccgatactgttgcttggaagtcttataagaagtaccagttgaggctgaacctgaataccatgtctatagagccaggcagctaacacaccagagtaaagtggaccaggtgagaggtgaggagagatgaagattccaggagagaacacctgccctaaaggttgcaacagctattggatgagagtagagcaggtgggagattctgatcttcaggaaaatatgtttcttctctctctctctctctctctctctctctctctctctctctctctctctctttttcagtgtaaattttctgttttgaaatcagagtgtaggtcaaataactcacctgttgattggtaaactaacttctctctaggtttcgtctttactccttctttctcctcattctacttcttcgttcattttgtgctgttgtaacaacatgctgaagactaggtaattcataaacagtgatttattgtcccacagttctagaggctgagaagttcagcactgaggggtgttagggcctgccagtgtctagggagggccttgttgctgcatcataacatactggtagacactgcatgacagaaagggaaagaaagagaaaaaaagacaaagggggccctgcattatcctctcataagaagctcactctgccatgatattaatcttttaagagcaatctatctttatggtctcaactctccactatgattacagcagcaaacattcccacactggtttgggaggggcaagcattaagtgatgatgccatctctgtcttctctttgcttggtgggtggttagggaccaaaatggccttcatttctttccctaggccttatcgaaagaagagagctggtcttccttagcacaccccgtgagcaggggaccatattcttagcactccctttagctttgttcagctcaaggatgccttttttttcttctcaaagaactcacacccagccccaagtgtatatttatcatgcacgtaaggctataagatgttttttgtgcctacagatctgaaagatgtttcttttctgagtgagaaatagctgcctggctgccattttcctggttgctaatgacaataagctaccaggcatgcagataatcggtttacagcacagatctttctttctgatttagatccctgttctcacatggatcctgtatatggcaagagctgtggtttcttctcagactgggtgattcttctactttgtcacttgctttagagaaacctgtgtctgaagtattcagtacctttgatcattacattgttaataatttagtctgctgagttttaattttgtacttgataatagaactgaaggtgtgggttttttttttctggggccaggagcagtcaatagttgtgtttgtactttgtgggttaaaattatttgggctatagcttgaggctgcagaaactcttgatggccgatattaacaagaaacaaactgtaagcctactttttctggtggcaccgtggttattacagacttaaattaatgtgataaatgtgacagattaagttacttctatggaatgaatatatacatgcacatctttttattataagtaaaacatgtggcaccataaaacatcaacattaagtggctaatgtgcactatagattttaaagaaattaagctcttgctaactgcttctgtttatgattcatctggtgcagggagatttaaatttctgacctacatacttcaagtagtttgcttcttggggaaaaataataggtagacagacaacaacaaaaactcatgtcctaattaaaacccctaaaatgtttcattttcatatccactgccttaaaattgtattagtgggttaagaaaatagttttctgggttaaattcagatttaattgcataattaggacatgtcaggtgtaagggcattgcctttcacttcaaccaaaatacactcggctccatttctacactaagaaattgggaacaacacaatagcagagtgtcggagaagcatagttccatagtctatcttgtcttttcatcttaatccagaaggaaatttgctgttgttgttttatttcctctttaacctgttgggctcttttgagggcccaccacccagctcctcctcctcctccttctcctcctcctcctcctcctccttcttctttttggtttttcgagacagggtttttctgtgtagctttggagcctatcctggcactcactctggagaccaggctggcctcgaactcacagagatctgcctgcctctgcctcctgagtgctgggattaaaggcgtgcaccaccaacacccgaccagagtcattccttcttataaatgcccagccttagcttggcttgtttcttgccagcttttcttaacttaaactatcccagttaccttttgcctctgggcttttttcttttcttctgtaatcttactttcactcttactctgttgctgactgtcattccttcctttcttcccagatttctcctcctatttattctgtctgcttgccagcctcacccatcctttctcctgcctttttattggccattcagctctttatttgaccatcaggtgttttagataggcaaagaatcatagcttcacagagttaaacaaatgcaacataaaagaatgcaacacatctttacatcatcaaacaaatgttccacagtgtaaacaaatgtagcacaccttaaaatgatattccgcaacagaaacttgtgtctcacgtgaatctccatggtgtatcatcagaccaaactattcctatcatatccttttgcctctttcccaaagtctttcatatctattcaaaaacaaccatcaatctactctatacccacccaccactaccctaaacttctccccaccaagcctaggtaacttttgttatctttgctccttgtgtcttccagcattttctaagttgcctttcccaatttcagtatacttttctctacctccttattggtctgagacagagagagagagatgagtggaccttataagtacagaatggtgatggtttggtttcaatagagatgtctcctataagtctcaggcatttcaggcacttagtggctgtttggggaggattaggaggtatggccttcctggtggaaatatgtcactgggtgccagctgtgaggtttcgaaagactcacaccatttccagatagctatctctgcctcctatctgtgcttcaagatgtgagcatgcagctgctgcttcagctgcctgccacctgctactcaaccatcagggactactctcagcattaagcctaaaacaaaccctttcttctgtaagttgctttggtcatggtggtttatcacagcaatggaaaagtaactaagacaggttgccttggggggaattatgtaaatatgtctacctaatttcatttcacctgacattaaagaattttaggtgtgtcttgtttcaaagactttgatgaaacacaaagtgcttgctatagaattactcatagctgaatattgtgtattatcaccaacacagtcttttatttttatttttatttttcaagacagggtttctcagtacctatggaacctgactggaactcattctgtagaccagactggccttgaactcacagagatctcctgtctctctgcctccctagtgctgggattaaaggtatgcaccagcacttcgtggtgccaacacagtcttattcctaggagcaaggagggccagtatcctcatactgcttcatcctgtacccattacagcactgagtagttcattctgtgtctccagagaccatctgcctttaaaactggtgacagcatgatttacccatggcatttagggcagtactcagcttgaaactactctacaatatggtggtggtttcagttccttgtttgtccctaccatgttccacatcttaaatagtaaattattttatctctattaattataaagcttgccttgaattataaatgatcttgtgcacacagactgacttaaagggtgagagaggttctatagtgctttacacatatcttgggcaggatacctgactgctgggtggacacaaattggttgctgagttacagactcaaacttcagttgattcgaatcacagaatggctaaattttacatgtggtcttgaatgacagaacatcagagcttggagaaccttctccccactatactcagtgaatatttactggaaaatatggagtcaaaaaacattgtacctgagggtcatgaatcatagcaaaagaggggatagaaagggctgggcggtggtagcgcacgcctttaatcccaacacttgggaagaagaggcaggcggatctctgtgagttcaaggccagcctggtctactgagcaagttcttggacaacctccaaagcaatacagagaaacactgtcttgaaacaacaacaacaacaacacaaaaccccaaacaaacaaaaagccctccccccaaaaaaacaaaaaaaataagaaagagggaaagaaagattgtaagggacaagaagtttgttgtgagactgtgtctcctagaaatgttaggaaagatatacttatgaggtttcaccaacctggctgcctaaacacgacctgaataaggacaatatcaatagccatgctaacatgaaagggggaaatctcatgaggtctcaaccccatacaaaaactacaggcaattaagaaatattgagaggaggagaaatagtcttccccagagaagagcccccaaattattggtcaccctgaaataatatacatacaagtaacattaaacagactagtcaggatgtatttatatatttaggtatacatatatatcattatggtatataatatttaaatatgcaaacatcaaatatatatatatatatataatatttatgtatataatcacacatataaatctattacatatatttaggtatatatgtttaggtacatagatatgcatgtttatcacaacaattaaggaaataaaggaggccatgaatttgagagaaagcaagggggtccaaggtagggattgaaggactaagtgaagcacaacaggaagcagaaatttaagaatgactcagacttcatctttgcagatcttattgtctttgtacaatttaattgatgtggaccctcaaatataactgagacaattcaatatgtgctttcccatgaacaactgttaagcagaatgtatatggacgtgctccattctgattgaccatttactcagtcactagtaaaacttttacacttactttctaatgattcccataaagctgttaaatagccaggcagtggtgtgcacacctttaattgggaggcagaggcgcggatctctgtgagttcgagaccagcctggtctataacagctagttccaggacagcttccaaagtcacagagaaaccctgtctcaaaaaaaaaaaaaaaaaaaaaaaaaaaaaaaagctgttaaataaaagtgcaaaagaagtgcttggaaaagccagaagaagtaaacattcctcagattcctactgttgagaaaccagagcagctgatcaagtgggtaaatcccaggacatctaaccagaactgcagagatcagagcagtatcctgactccctaagcaggatgagtctccagctggtaaccagggacagacagaagcctctttggggtggggtgttgagttttccattcacctagctcatcttcctaatttggcattttctcattgaccaaaattcctatcttctgaaatactctcgggttgctgcctgcactgtattccatggactcctatttggtgaactttcgtgcagacttgttcgggactcagagctttgtggtgccatctgtaaacgatctattatagaaccagaggcaagcagagatttcagagttcgttagtacaagaagactggtggtcacagttacagtgatcgggaaacttagtgggagaatggtagtagaaatcatgaagttatgaggtgcaatgtgtctttctaaagtctacattttgaagctctcaccccattatatcagactatgactgtatttgaaagaaagaactttcaaaagacaattgagttaaaaggagcctcgttgtgtgggccctgatgcagtctggctggtgtcctagtaaagagaatatttggacagagagacaccagggatgcaggtgcacagagcacagacctgtgtgatggtttgctctcagggtcactttctgtgggcccttgtacctagctattttatcatacagtaatgattgggggtggatttctgtgagggtattttagaggttatggattttgtgtaaggctgattgccttccatgttgcaggcaggccttatgtagttagttgaaggcttgactagaacaaaagtctgacttcctccaagttagatggaattcttccagctaactgatttggatttcatctgagagacaggctcttcctgattctactgatgactcaggaggcaacttcctggttctacagcagtcacaaatagcaacttcctgtcaactgcccactgtgcagcagcatctgtaactgacttaagtgacaacttctgtctataaccaactggagtcccaatctgctctgggcagtggacttcaacggcttgtaactctttccccggtttcaagcctactggcccttcctatgaggcttttggatttgccaagcttccgcagtcacataagccggttctttaaatctcttcccacacatatattcatttgttttgtttctcaagaggggtttgactaatcaaacatatgaggacactatgggaaggtagtcttgatctcagactcctagtccccacaccagtgagaagacaaattgctgctaagcaatcaagcttgtggtattttgtcatggcaaccctaggaagctaatcctcagagtgtgaattgctatagcacaacaattataggtaataaaatgcagcaacatgggatagtagcacttttataggggcagcagatatctaatgagatgatggtgatagggtcggaagctaagaagaggagcatggcacactcgtagtaatgttacacaaactagctgaaatgtattaaggacacaggactataggcaagtgtgtggtgtggtgtggtgtggtgtggtgtggtgtggtgtggtgtgctgtggtgtggtgtggtgtggtgtgctgtggtgtgctgtggtgggagatcaggtagagactggttctgctgctgactcagggcctggcatcactgtaagcactttatccagtgttcaatcataactctcatataatatccttgtgcctttctcagctgttctgacaagggtgcttttatttcctatttagtcctttagtttttttttttttaatcacactgtccatagtgtatgcaccctagtgtgcatgtgtcctgaaattggagatgctaccttattaaagaatttagggaaagggagaggggatgtagctcagaagtagaatcttgcctaggatgtacaaactattgggattgctccctcagcaatgcatatactcactcactcacacacacaggtacacacagagatatacaaacatacacatacacaaatacacacacacacaaacacacacatttacaaatgcacacatagatatacatacacaaatacacatatacagacacatgcaaatacacacacatacacacacataccacaatacagacacatgcaaatacacacacatacacacacacacaccacaattttacattttcttttttgtttgtttttgagacagggtttctctgtgtagctttggagcctatcctggcacttgctctggagaccaggctggcctcaaactcacagagatccacctgcctctgcctcccaagtgctgggattaaaggtgtacatcaccaacacctggccaattttacatcttttaacaatggagagattaacatctctgctgagttgaaattgtgagtccaagagaaacaccaatcttgtcacttcttagttcttggttttgtttctctaatgccagtcatcaatgtgattaataatatttatttttaaatttagctctgattttacatgacagtttctagaaactgtgtaattaagcatgtatatattaaccatagttctttaattagctgtcttctttctctgacgcaacttagtgtttatttatttatttatttaatttattagaacttggaaataatgaatcatcctcagatatatctttaaagttttgatgaccacaataaataaatgaatgcggagatagaagttcctggaaacatgttttgctttttgacagatatatacagatttttgtccttgagtagctaagggccaaatgtgatagattcgtattttatgtttctatgtgtaacccttaagagcagcaaagaaatgatttctgcggacggttgtttcagttgacacttttctcctttacagtttcccaaggagcatccctcctttgatgccttttatactgtatttaccgacatacaaaaaacagaaaaaaaaatagctagtagtcaaaattattatgttgcctagaaacaaatcagggtgacatttgtttgaacaagtcaagagcaaactgtttataggagctgctgtagctgagcttggggtcaaggctagggagttacacctgggcatgttttaatttttcttcctttgaaatattgtggtagacaccagcttatctcaagtaggttattgcattctatacacagatatgtcatctgcctacaggtcagatatcaaaatacattttcccaggttccttatacaaatgatgtagtatttgtatatgccccatgaacagcctcttaggaattttaagtcatctgtaaaccacttataaaattcaaaacaacggaaataccacagaaataatagtgatgatgattgatcagggaataatgacaagaatacaaattttgggggctaaatagctggtccagaagttaagaccacttgctattcttgcaaaggaccagaagtcagttgccagagcccatgtcaggtatctcacaaccacctgcagctccagcctcagtgggtctgatgcccttttctggactcatcaggcacatacattcacatgcacatataaaggtagaaggagagaaattactccatagaattgtcctctgacccccatatatatattcacttcagcatgcgtgcctgcacatacaaatcatatacacacacacattcacaaataaataaataaactatctagaaagatatcgctctatccaaagttcaaggggaaatagcaaatatcaaaagagctatccccttgagatatccctgaagtagagattagaaaacatgaacaatgaagcttttactttcctgccttcttgctgtattatatccttcatagcattttttgtgtttgcatatttatagcattgaattattttccttcctcttcttcccagttactacgcaaaagtttgctggaacttctattgtcaagcatggcccgtaagtggcttaaaaggtagacattacacgtggaagtggtgggtgggttggctccatctaatgactcatgcaagtttcattgaggtctctttccttggctcctgcagaaactgattcttgcaatgtcttttcacatgtctctatctcatctgtgaaaattccagctatgattgggataggctgcagctaatggctgcctttctaacttaagtacctccagaaagacctctctttaaataaggcccatttggaattgctagatattaaggcttcactacttgaatctgaggggttaaggtgtaattcagctcacaatagatggtgattggattcccttatctcatacataacttaccatacaatgaagcagaatcatggtgaacctgaaggagcaatggaggcatcacaagaggcccaagaaacaaggaggccttgagaatttagatggtctgtgtgcgtgggggtatgttgaggtgtgggcaatgatgagtgtatagtcaaccaaagagttacattgtatttttccagggttttattttatttatttatttattttttgagatagggtttgtcttagggtttctactgctgtgaagagagataccatgatcatggcaactcttacaaaggaaaacatttaattgggtggcttacagtttcagaggttgagtcctttactatcatggtgggacatggtggcatgcaggcagacatggagttggagaaagagctgagagttaatatgtcttgatccacaagcaacaggaagtaaactgtgtcacttggcatagcttgagcataagagacctcgaaacccaccccacagtgacacatttccttcaacaaggccatatgtgctccaacaaagacacacctcttaatagtgccattccctatgggcttacgggaccacagggtctcagtatgtggccctggctgactggattatgttatatagatcaggctgaccaagaatttgttcaattccttgacttcctgagtgctgcgattacaagcatctgccatcaacactttgccctatattttattttattacagagtcttacattcatagttcaggctcgccttgaactctcctgcctcataccccaagcactgggattccacccatggaatctaagttattggaggtattttccacatgcatggaaggacaggatgatggcaacaaggaagaagggctgttgatgtgtgacttcttgtagaatcaatgtcaattcccctcagacagcaagggcaattacagatggtagaggaggagatttcaccaaaatctaccttttgtgaaccaatgagctgggtaataggttactcacaacattgtaggaaatttatggacagccatccaactgaagaaatgtcttttttccccaacggttgccaactacctgcatatcctcagagaggagaattgctctatatgccttgtgagcctctccagctctcaggagagaattctagggtccccattcttgggagagtcacatatgggcaatcacattctgcttttttgatggcagtgggcttgtcattcctcgaggacagagttccccagtagctatagtatacatgttgtgactgctgagagtacagtccaagtccaggtgaacccctcatttccattctgactttatccatccttcaatgtcaggtcatgtactcaatggggtataaatcctttaaacttaaactgaaggtgagaacctatgactaaagctaagtgaattgaattttctttcttaggaatttgtacactaaatgaagtaatttgtgaacaaaacagcaacaatagttgatggtcctttgtggcaacctgaatagaagttctagtaactccagtggtcttagttcccactctgtccttattgtgacttgagttcaccacttacttgtggaatttgtatattatctgtcataaatgaccactttcgctcctctaggttagtggtcactacttttggttgagtcaagttattgtataacatttcctgtgggaaaattcttgatttatttcctggttttacatccattagacatgtctgtatatgtttatgttttttattttaaaacagggtctcaccatgaagttctaactgtcctggaactaaccaatagatgaagttggcatcagccttacccagattcacttgcctcagccttttaagtggtttgattaatggcatatgctaccacacctggctatttatgaacctacaaaaatagtagcaagtagatgcattaaataggacattttctatatttcttctggaaaacaaatatgtatacacaaccatatgcattcatttatacctatatgtgtgtggcatacaaatggaatttaaatatattataaatatattatgtactcggggctcagcagttaagagcacttgttggtcttccagaggatctgatttcagctcccagaacccatgttggatggctcacaaccccctgaaacttcagactcagtaactccaacaccctgtgtctggcctctgtgggcactacacacatgtgccatacattcacacacacacacacacacacacacacacacacacacacacacacacacacacacacagaaagaataaatcttttaaaatggatgtttatgagtatttcctgcatgtatatgtttttaccatgtgtgtgcctgattctcaactagaccagaagagtgtggtcagttccctgaaacttgagttacagatggtggtgagttgtcatgtgagtgttggaagcagaacccaggtcttccacaagagtggcaagtgctttcaaccactaagtcatacttcagccccttaaaattaatctatctatcatctatctatcactgcaaatcctatacgttacaagtttttgaattttcatacattttctttccttttacaatttgttaaattgttttttgaagaacttattttgtgcaataaataacaatgtaatgaaagccatgacatactagctgggggaataatacagggatgcacacatactgattattagttctcttcaccccttcacacatatgcacatacacacatgtacacatgaagggaggttcttcattgagttataatgattggtaagaatcagcttgaagatatagttagaaaaaggtttgcaagcacagctatattccaatcttctaaggagtaaatggtgttgtctctgtgggtagcccagcaacaatgagactttttttagagtgctgctgagggtagacttctcatacaatagacactctggtgacttgcagggctcagagtggcaaaaaaagcaatgaggctagttcccaggcctcaaacaacctacaaaccaaaacacaatcctcttggaggagtgccatgctcttagtgacaaaaataggaagggttttagcaaaaagaaggtgtaggatagaccatgccactcagcagaaaccttcttcaagctttcctgctaagcgcttgacaacagacccaatatttactagatgcttactgtgctcaacgagtggagcttatttggatataaaattagctaagagtaggccccaggatctagggcatctatgcattgcacagcaagggaaattgaaaatgatttgtgaaattacgagtgaattttcaactccttttagacattgctgccaacgatgaaggtaaaagtctttatcttggcacaaactgggaggcataaactgtagatgataatagcagttacttggggtacccctcatcatcttgtttggagtggccactcttccctgagttgaagccatgcagtttgagtgacgtttcctgtacaggcttatgtgccctcttcacagaggtaaatatggggttgcatatgtggggaaacctgtctagagaatttctgtgttctcccgttctgttcacatatctcttccatgttccatgagaaaaatgtggacgcagagcatactggaaacacagcaggtgaaaagtcacttaagaagacgctggaaagaggcaaggaagtgcagtcaaagcagacaaaccagcccatccactttctgaccaactggcttcagacatcacatgttctgtttgaggcccaattttctcagctgtacgaagggaatagttacaactctccttttatctgtctcactgggctgtggaaacctcaaacaaaaaaatactgtaagcccgaagaactacacagcatgagtcacagccatcagtgatgtcacgggttaaatgaattatactgggatatcattcaaagctgttgctattactctcaaggctgaggagacaaagatagcattcacatatttttatctttcagctggatgtgtgggagggaggtgggacagagggatgggaggagagagtacaagttgagtatgtgaaacttgttaacagtcagtgcagtggacagatgggtttggaagagatcagttgtgttttctttattccgttgcgcctgaattctttgcagtgggtttctccaaattattttcaatgcaagcaggcacccaatgatccaggcagatctgagaagtaaccggcaaagaaataaggaatgggttaatgactggtccttgaaaggaaatttaatattatacaaaacatgtcttctattgcctgtaaaacacgaaccactaaaatgactcaacccatctcctttctcatcctgtagtaacctctgttggtaagtgggtttggagtgaagtggagagaactgacatggcactactctcctggtcccagaacaagagtggaaagtctgaatcataaacaggccttccccactaattagaagtttagacttgtcatttctacggagccagttcttaaactggcatgttttttttttttttaaatgcagaattcaatgactcattattttttttttttagtgttctgtggaggcaggaccccattctagctcaggttaacctggaatttactctgctggttactgtggcctcagactagcagaactcttctgaccttagcccccaagttctgggattccaggtgtgagttaacacacctggctcaatgctatttatgaggaatggtgtgtgtgtgtgtgtgtgtgtgtgtgtgtgtgtgtgtgtgtgtgtgcctgtgtgcctgtgtgcctgtgtgcctgtgtgcctgtgtgcctgtgtgcatgtgcttgtattctcacatgtgtaagtcactttttttttggtaatttcatacttttctaccccttttccctaaaacaaatccacctgctctaccatattttggttctgttaagaaggataaaaccatcagataagttcctcttttttttttttttatgttttgtcccagggtccaaaattttaggttttctttttttcttgttcacttaattgatttagtggcttcatttcatttacctgtcaaggagaggtgaagtgttaaacaccataggttcaactgaaaatttacttgagctgacatgcatattacaatgtaaatgtaactcccttcctagtggctatttgagtatttgaccttctgtgcttaagtttcactgtacaacacttggttaatatttaactgaagagacagagaaaattttccagtatatttgaaaaaaatagtaaagcttcaccttcatttccattttttaaaaaagtgtgctcttcctttgagtaaaaaagattttttttcatcaaaatgtatttcattgaggtaggtttctttgtaaaattattactgtcaattcacaattatctttacaagaaacatcaaaaagttgagagtagagttgaaggtgtacataagtgatatgggagagccaagtaaagtcattggaataaactgcctaggatgtgggtacttccaacgttagccatctgctcaaacaagatgtcccccataaagacatagcgacaggtattagcactgtgccaccaacccttaaaaacttccccattcaaaaaaccttcctgtatgattgaagtttttcatttctactattgtgtgtgaatatagcagttcaggacctggatctttgtgtagactgaactgtcccctcagtcccctcagtcccctccacctcctctactccaataaaaatctctggcactcatcagtgccttaggaagcttgtttagaaccctgacacaaccaaaggctttgaggtcccctcccaagacatctgtgattccaggttgattaagtacctggtgatgtgtagttagatgacacttctgcagaagtgtaactgtgtaagtacggattccggaaggataataagaagcttatgtatatattgcagacagatgtgtggagaccaaatgctggaagacctaggagagtgaaagagagcttaaagtaaagcagctgatcccaaatcagccatgttcaatccaacttgtgtgtaagttcacagggaaagaaaaacattgagccatgggcagtagtgaatgccttttaagctcagtagttggaaggcagaaggatctttatgggttctagaccatctatatatatatatatatatatatatatatatatatatatatattgagttctagggtagccaagtctacatagcaaggctttgactgaaaaacaacaaagccaaacaaacaaaaaatgtctcattatctttgtgactctgagcaccaagtcctgttgtttttagcattctcccaacttcccattattataatgagttcttaaaaagggcatatgaaaattgtcacatcatgggttgaagctcattcctccctatgggcgttcttggtttgaaacaatatcaatcaaaaaatcaacgggaggagaatgtgttctgatgtggccaagaatatcagtaatggggcatcaatgtatgacggccaggaatgatttgtaagaacctcattagagatcctggttgatgtagtttgaatatgaaccatcttcccaaaggttcatgatgtgaatggatggtctccagctgatggttctgtcagggaaagaatgaaaacttttggatatggggcctagctgaaggatgtaggtagtggaggcgggtcatcgagagtacatcatcactcagcatctcctgtatcagtctgctgtctgttcccagtgatgagaacagctagctctcttccactgtacacttctgtcaactgtgaggctctgcccaacaacatggagccaagcaaatcctgagcccaatataaatccttcctcatttaagttgtttctgtcaggtattctgtcatagcaacatatatactgccattcagagaggaaggaaatggagctggaattccttcaagaccaagtttcactgataaccagacattatttatcacatgataataaagtcattagacatgtgagtgaatattaagaatcataattttatcagtaattttttatggttgtgaaatagataacaatgactttattccaatagaacttcagttcatgcctcaggctaggttatgaagcaacattttcctgtagtcacatgcacagatttacctattatgtaactttggaacaactttgccattttgcttcctgtactgtagatttaacccagtgtctcactcgtgttaaagtgctctacagcagccctgctttgccttttaggaagatgggctgtttcagtgaatgactttctaatgctagtcagatggtgtggtacaacaaaactaggcatgtatcctcatttgtaaaccaaggagtttggggaccagcataaaatggcttagttggtaaagccatatttgtcaagcctgagaaccttagtacaatctccaggagccactgggtagaaaggaagaagcaactcttgcagtctgtcctctgtccacacacatgtgtgtaaatatgcatgcactcacactcacacacacacacacacacacacacacacaaatacacacacacacaattatattttgaaaaaaaagaaaaatttgatgtgatgtgagaaaatattcaataaaaatagctattttagggtgatcattttacaaataaaattgaaaggtatccagagagatttggggatgatttccatatgaattttatgattctataggattcaacaagatcaatacagtacttcacatctactctgtcatatatgacagagactacacattagagatcaaggtagagagaagatgaagacatgaactcatccacaaaggattcttcaatgtaaagaaactgtcaacttatgaaaagtataataactattttgtaactgaaaagaagcatttggcagttttgtgagagtgtttcaggaccgtttcagagagatggctctcttggcttgggttttgaaagcaggtgaggcaaatgtggtttttaatttaggaaaaacaccacataaaacctcaagtaaacacaaagcagaattttatacactgaaaaaaagcccctaccatttccccaagggctatccaaacacccacaggaaagttggtggtgtcaaaaattcatggattactttggagaacactggaggtgaaattggagaggtggacttctgtcaggtcattggaagtcatgcgaggggtatgggttccacatgattggcatcgagaaaccactcagatgttgtagtaaggtttgtaaaaagattctatgagacacctaaatagaagacttccttttcccatctttgtcctgcttctttatggaatccttgttcacatgggtatttgcaaggcttatgatgatgttctctaaaatttatgactatcactcctatgatatatagatgttaactatcaagtacgagatctaattttgtgagttcattattttatttttctttaaattactttaaatattttgtcatgataaaaaacaatttgaatttgagagactatgcttatgctctctgtttcaaagacatgtttttgggcagaggaagtatagtttttcagtagaatccagggtttcagtgtttaaacttagaatggttaaacccttggactccaagacatgccaggatttgaaaggattttagattctcccaatgttggggttgggggaatctaagatccaagtggattcacagtgacacttcggaatccataacccatttgggttttaatgtaatttgaatgttttatcaagattgaagactgctttctaagaagacagcttgccataaatcaaaaaactaaatagcagaaataaatgggcacttacactagcctagaataataaatttttatcctagttcaaaatgtttctgattaagatatgtgcttaggagatgtagtgcaaagattactcttttttgttttcaaggcagtttaaagagttatattgcatattttgtagttattatgaacatattaaagcttcaaaatgggcagtgccctgctattgcaggtgctgattagacattgaatcctatcccttcttactcaaataacttcttttctattctagaaatgttatatttgcaattaaaatcctatctctctgtgtgtatgatgtgtatatgtgtatgtatgtgtgtgggtgggtgttcatgtaccaacatgggtatgtggaggtcagagaataacttgctggaattagttctctcctgccattagttccaggcatcacaaactcaggtagccaggagtgcacagcatgtgagctaggccaccttgagagatcaatactgcaatttgtaaaagatcttcggaaatgtcagacagtggaacacagtacaagtagttgttgctcactcctgtaggaaaggtctccatgtatccttgtattatagtgtatatgtttatgggtggggctacatatgtctgtggggttgcacaggaaatggaagccagaggttgacattgagtgttcagacttttagcatccacataaaaatgttataaggatgctgaagtgtagctctccataatagatgcctcctggcagagtggtggcggggatagactcacttttcttcaaggggctagccaccaggcatttaacaatgctccagtggctatatgaacaatataaattggacttttctttttgatgttcttttgttgggggagaccacaagggttgagggacagacctgggaggactgggaagtaagggtgatggggtgcattatgtaaaattctcaaatgatcaataaagtgttatgtaaaaacaaaccccgtcatgctaataatcctggggtacagaaacaacagggttctctgagactggctaactagtccatagccagtcagatagctccaggttcagcgacagacatatctcaaaaaatcaagaggaaaaaacattgagtaggatacccaatgttgacttctagacgccacctgaaaatgcacatgtgaatacatgtatatcaacaagcacatgccccccccactcacatggaagtttattattgtggacattaataacaggtaaaaagaagctgtgtgggccgggcggtggtagcgcacgcctttaatcccagcactcgggaggcagaggcaggcggatctctgtgagtgcgagaccagcctggcctacaagagctagtgccaggataggctccaaagccacagagaaaccctgtctcagggaaaaaaaaagctgagtgaaaaatgtatgcagttacacgtgtttcatttaacctcttagaagttaagctttgcttatctataaattacagcattaagtaccaggcagctggaattcaacattgcacataagattttaataggaactcatatatttagcatttatcttcaaagattaaaagttttgagatgggcattgtggataacctgttagaactctgagtaatcactgaagaactagagattggatgagaaaatgagaacataaaaggtcataaatatggaattcaaaaatagcaaacaggaaacacacacacacatacacacacacacacacacacacacacacacacatacacacacacacacacaaagaaagaaagaacagaaaaaggaatacataaataaaaggaaaggaacatactattgggatacttagaaatactggattcacatagccaaatactatcatcaaaataaaagcattttgaatacattatccctatgagaagggcaagcctagataataaggttgtacatttaacacaccagtaaatagaacattttatttccagtgataaagatcttcaagaatgttgttattcattatttccaatgagcaactgtgttcccaagggcactgagtataatgaagtgaatctaacaataagcttgcttttgaaaactgaggtcttttggttataagaataaattggaaggggctttcctctcctgttgagagaaactcaaacactcagctatttgttgaaaaagcgctggggaattgtgtgttggtcaggcaaggagttagctagatgtacatactaaagtggtggtcctcggtactacgagaagatacaatagaatcagtattaacagcagcagcggcagcagcaccatccacatcaccaccatcatcataattatgaacaacagtagcagaaatagcagcagtagcagtaccatcaacaccatcatcatcatcatcatcatcatcatcatcatcatcatcatcatattcaacaacaataaaagtaacatcaacatcaccagcgcagaaaggatgtcagataagtgaattctttggttctagctaggacctatggagaactagaaactgggtcactgagatgttaagctaaagcttcagtcctagtggatagcagttattaacaagctgggcagattccagacatggaaataacacaccgtatgctttttcaaactctttaatcaatgtacttgaagacccaaagcaaaggctttccctctgaaacatgctaaagaagacagaactgtgctcccctcccacttctgctgttccccaagcacttccaggcaggacgagccttatctcagtcatatttttattcttgcaattctctacacagtgcctagtaattgagatgttcgttaaaatgaaatggaatgaaggtcaagaataaacagaggggtgtgtgatttatcatgccaaggtcaaattactactgaaatcaacagtacacatagcaaccagacacccggcagagaagagaagtaccagggagggagctggacagtgttagggaaagattgtctgagtgagttgctacctctgaatctggacttttctttgacttaagtgaaatcacttattaccagtgtcatagcaatgtaggaggtattttcaggttggatttctagtttgggggttggacttctactgagcagcccacactaggcttagaactggctgaatggggccctgcttcaaagactcagggtgttgtctcaaccttaacaaccttagcgtcagtattatttgaggccagatgacccttagccgttgagggctgtcctgtgattttcttgcactcctgtctttggcttctactctacagcagccaataggttctcaaaattctagtaggaacaaacaaaaatgtcttcagacattgccgaatgtccttcaaagggcaacatttcctacagttgagaatctccgaactaatgtaagatgaatgtggtagggggctggggggtcagaagtctttcctgtgccatcacaatgccacagggctgtcgggaacatatcagggttcacggaatgggggtagagaaagctagaggaaaattcaggtggcttagtggatctcggtgcctgaacagcaggtaaccggagggagaattgaaggccatgaaggtaagaagaaaggacagggagaagaagaggtatagggagttaatgacttgtttcagggtaaggacagggatgagaaaatgcagaggtctgaaacagcttaggatactaaagacactcaagtcagggaagggcagtcagttcttctgaagcgtaaacagagattgtttttggcagcctcaagcaggaaccaccagtcaggagaccacattcttcacagcccaaggtcaggcttctgttgctgttgacagtgaggttgtcacatccatctgcccttccttggggtcactgaatcccccccccactgtccttgatcttgttgatttgcatatgtgtcatcttttacttcttcaccgatggtagaaactagtggaggtttcgcaaaacatcagacatttttctctcgaggattgggacaccagcacttaaaaagaagcgtagagcttgaatataaaggaaacaaaagtctcagcaatgtatatttactctgaaatcattggggagagagagagagagagagagagagagagagagagagagagagagaggagaaagaaaagcaagcaagcaggtttaagggtaaatattgtcatctttgtgtctgacctcttttgactccagtgtctgtttaatgtttagcttagttcctgaataggtaggagggttttgcccagtgtttactgcatcgctatgcttaccttattagtaatggtaacaacactactgtagggcataataatccaccatgaactgtctaaggaggtgagctcatgtgatcactacagcaaccagagctaaaaaaaggaattatttgtaagaccaatgtatgttatatcgtacccttaacccattatattctctcagccttgcctcctgtccctctcatgagggacaaaatttgtaacaaaattattttctatctcaggtatttattcttactataggtgagattcaaaaaaagttttgctggtgatagaaagtgtggttagatattttcagttctttttgatccttcaattataaaccagcaatggaagcaatagccgtccaggtccaagctcttggttttgcaagtaaggaaataaatatgaccccctgcctgttcagtgcagatccaaggtcgaacctaggacactacatccatacactgggtgatcacataaggatttaacatttaatgtttatgcctggtaaatccgggtctctaagccggtcaccacctcttcacagccacagcttgaactacgacacattctctcctctagcttgtcttctgcagaaagacgtgtcagctgaaggctgacttcaagggcataaggaacagcacagtcaaacaaaacaccatgtgtgcctgcctattcttccaaaaccctgcttgacaacactatacaggtgtcgaaatataatactttctctcccgctccccccgccccgctacccccaaagaggaaaccagagcctaagagggtaaattttgcatgggattttgttagccagttcaacatctgtttgcatcttaaaaaatgactcagatctattccttataagtagggcaggagggcagctggaatttcccagctcattctgtgtcactgtttcctgcctccgctgctttgtcctcccaggcatattttattggcaaaaaaagaaacaaacactgtactaccccagggcagctggctgcactgactcatgcttcttatgtttgtgttgggaaagctgagggcaatgccagtgccttactttaatcacagcgtgaataactacatgtcttctgaaactgtgttactcaatatcccaccctgaaggaactcggacacagccagccaatcaaaggccgtctgccacctccaatcagagcttgtcactgatgacaaggccctgtgggtggatcatcacgagaaggaggaaaaacacacaaacaaaaaacaccccaaaccgaccaactgaccaaacagcggaacaaaaaaagcctcattcctcacaagtgaaattaaatccttaaccaaagaccactgttaatgagctgagcatccacgggcttgacttagtcctgaaacttgaaaatactgtgctctcagtttggagtgtgtgtgtgtgtgtgtgtgtgtgtgtgtgtgtgtgtgtgtgtgtgtgtgtgtgtgtaagaaaaagagagagtcagagacagagagatatatagagagagggtgggagggagggagagagagggagagagaactaatgtgagagtctataagatgacaacagtaaacacaggaagaatgggaagagagtgttttttggagatctggtaaattcttcttctagggttctcattttaggactaaaacgaatacacttccttgcctagctcctattgtttcatttcatacacaacttgtattgtgcaatggctttgttttgagaatattcaatacagcttattgattctctcactgtctattacaagcagggtggggttgggtaaaaataaaaactcaacgatacaattagatgaactctacatgttcagacttaagatggtacttcattataccagctctgttttgcaaaatttcacccgtgaaaggaaaattaaaacttgggtaagattaatttctcggtttattcatttttaaaaattctgtattttgacccaaagtgatttcccttccctcttggttactttgggggggagcaaatcaagcacccaaacccagaaacaattaaactcctgtggaaaaaacccaaaccaaaatacgataaaaccaagaccaaagaacagaacaataacaaaattttcaaataattttcaaataataagtatgtctagttaaggcagcagaggcccttgtgtggacaggcataggtgcccaaggatgttgtgggtgaggggccctccccttcctgtttgtgtgcttcccagttgttaccctaggcttggacaggtatgattagctcaacatgcaagtccattcttgggcaactgaccatggagagaagctgatacagaccttgaaatggtccccatgtcatgttggttgaatctagagtcctgctgcccaaatcatgtttgaaatggtgtttcttaagcactagatgaaccggaaagactcccttaacccctaactggcattgctcttgagagctgaggctggatgaaggctgctattgaagtcagggttccaagtcagggtccaggagaagtgctgtggttcctcacattgttgggttctactgctttaaaacaaaacaaagcagtaaacaaacaaacaagacttcttaaaacttgcttaagatggaactttctggattctatccacagagactaccctgcagcagtcctgtggtggggcccaggcatccaccctgcaaccacaggttgatactctggcatttcctggtttggctccaaaccttctagttgtttaccatcgggagagcagcctttcccctaccctcccctatcccagtgactcactctggtgctgcctgttgtggttgccaatgccactctggacttcactgagactgcatgctccccgaatgcttgctgcctctaatgtttattttgtccttgacttgccataggagagctctttattgtttcagttgcccctgctatcgggttacaataaccattggtttttgcatcacaggaggggcctctccttggtattttcttgctctttctactatactcaggctccaatactatgtcacagaggcactgtgacctggacatagggccttgtgacctcaatactcccagatgattctttttcctattttctgagtcatgggaaggaaatatcctccagtactccttttttctttcacttctagctccagaagaactcagggcagctctcttcaatgactaaaatttggttctacctcagattcatgtgttgaaatccaagccccataggtgtgtgttagcaggacttatgggaggtagagaggttaggagggtggagcccacatgaatggaattaatgtccttataatcgaggccccagagcactagtgactccttgcaccatgcaaggacccagggaagagtgttgtctatgattaagcaggcttctgtagacatcagttggacaaaaccttgatggtgagcattctcctgaactgtaagaaacaagattctgttttctacaagctacctggtgcataatcttttattacaggggcccagacagacaccttattcttctgatggttctgcatatgagggtctatgacctacctctcaaccactgacatcatccatctacccaaatttctgtgtgtctgggcttagtggggctgttgcagtttgaatatgaaatgcctttggttaccagctggtggtgctgttttggaagaaggttaaggaatctttaggagtgggaatgccattaaaggaagtaggtcactgggtgtgagcattgatgtggtggattattgtgttttgttttttagttgctcactttagttccacttcctgtctgccctctacttcctaaatacttcttgctgccttaggtttctgctgccatagcttcactaacttggttgactgtatcctctcagactgtaagtcagagtaatccccatttaaaacacgactgcttttgttgggttaaggcatttactcacagcaacaaggacaataatgtgtacccaggcctatacaataagcttcatcacttcacattcgcttcttagattcatacctccctgcctctctctctctctctctctctctctctctctctctctctctctctaactcatgctaaacttgaacccataatgatcctgtttctgtcttctaagtgtcaggattatttttcttacagaattggacaactgatttgcaacactcatgtgatggggaatgtactgtgtatgtttatcttattgattgttgaataaaatactgtttgaccaatggcagcaagttagacaggactaggagtcaaagaggattctgggaaatgtagtagagaagtgatgttccaggcaggaagtgatatagcaaggagaaacaggaaatgtcccccttcccccttcgtctcctcgagcagcaggatgtgtgctactggcaaggagggatgccaataaggcgtccgataagtcttataaaatatatagatttatgataattaagactgagctaacagatgagaatcctagtcattggccaagcagctttgaacctaatacaagtctctctgtgtattcatttgggccctaactcgggtgggcggctggcgtaatgcgcacacatggaagtggggctcggcagcttttgacagaaagatttattttaacagtcatccctcatagttttgtgaactagtaaaggactagtaagggtcataaaggcaggaaaaggataatactataccattatatgcctattttagaatatattaaaaataagttccagcaccatgtctgctggcccaccctcataatcccaacattaaggaggctcagacagaggactgcaatttgaaggctagtcttggctatatagcaaaggtcaagcaccataataacaacaataaattaaggtcttagaacatcagacatttagaagatatttagctattgtgatttgtatatattcccagcagtccatattatcaaaggtttggacctcagcccagtgtgccattgagagcaggtaagaatactaaggggtgggaccttgtggaggtcttcaggtcattgggatatgtccttaatggggacagtacactcttccccatctcttcctctctcccatcccagccatgagatagagtttgctttaccatacactccttgccattatatactaccttgtcacagggctgagagcaatggtaacgtctaactatacatccaaatctacaaaaccatgagtcagaactaaacctttcttctttaaagttaattacctcgagtattttttcccagtaatggaaagctgacactgagatatggaacactattttttaaataataaactctattgtgatagatttgtacatataacctagataagatggtatgtgatagatcttctaccccgcccccacctgctgccataagagctttctccaccaatgcagtaagccagatcaagccaaactgatcaaagcaacttctggtgggttctccagtcccagagattgaggccagagaagtctcacatccgaactaaagcaaggagaagatataggctgtaggtgaggagtgatgatgtatctgctacaaggtgagtttgtgccccagtatggtcaaaagctgaatgctttaggtgggtctagggtggctggcaacttcaggggaggaagctgctgtagccaccaagaatgcggaattgggttttttggtaccttccctttgtttggagattctctgagtgggcagtgtttggagagataggaatggggctttctagatcactcagttgcaagcaggaggttccaaatgacagtatgtgtttgtaattctagtacttaggagtcagagatagaaggatcatgagttcaaagctagcctgggctacattccaggaaactatctcaaaataaataaaagcaaacaacaaacaacatgcacagaaaataggtctctatgtgttttttgtgtatgtgtactggaaatgtgtgtttatacatatgtgtgtgcaaatgtgcactagttaagacttatgttttcctttgttgtaaaatagcaccttcagaaacctactcaagtctctttcttagtgaattttcttatatttttgctgttaccctgtccattcagtgccattcactgtctctagggataagcaatacagaaccaccgaaataaaagaataaaatatttaccttttgaatactagattcactggcctttgtgtaagagatagattttagaataaaacatataaacaaatttcttccaccggcaactggataaaaatttccatcaggaaggggagacttaggagagacagagagttggatccttgacatgggttctacctgggttctgagaataggagataaaaagcatctccccaccccatcactgatgggtagtaaaggcaagaaagacgcccccccccatcacattctatgaataaggcagaatccataatttcttcataaccactatgacatggaaataaaagaaacactgttgtgctgtctccggacaggtgtgcagacagtagcctgtgcaatgtcctccaagtccaggaacatgtggtagcagcagggtatttttgaggttgagaggcacattcagttgtcttactttgggaaatgagtggcacagtggcgattgttgagtctctgccaaccagtacctggaaatcagatagggtggcagctggagtactggttgcctacatctgatgtttcttgatttttaaaggagcatttttcagtattatatttctgaaacacaacctgatgataaaatgtagtatttcctcattccaaaataatgcctagctattatcttaccattattaatgacccatcccattatctatttttcttcaattccaatgaaaattatggaaaaaattccccatgtgttttctatgttaattatattttcttttgtagcttcattttttatctttttatacatgggtagaatattccttgttctccatttcccagttcatgtgtgatgtgtttttctgcgatgtctagtacattgtttaagtttgtttactgagttcttaatttaatttttgtgttactattttctgccagattattatttttccctgtcctggagattgcattgagactctcacacatgtaaggtaagtattctattacctatccacaagcccagtctattcgaggaattttaagcttaacttttatctccctgaatgcagcaggcacagcctgtttgcatctttatcgaacaatctcagtatctggagcccctggactctctgttgctgttagtgttttgtatcgctaatgtctcatttccacccaagcctagttactggacagattgggctatgtgtttgcctgtaaagaaaataatttttcaaacataacatgcacgttatttgaagtagaatgcctgcttgcccgccaaagcctccttttcaactaagtgcctgggaattcaggatgacagtcatccaaggtcatccgatattatccagggcactccacatatttcataaatcttactttttactgttacttcttggatgaaccatgaagatggtttactcagttggtgctttgtctgcctccaggggctaatttttgtcttcctagctctctgtaagcccccaaagtactcttgatcaactctgtttggaaaacatattccattcaaagtggatcaagtgtcaagcttcacatctggattcctggcatttctgtattggactggttacccatcaggctcctctgaacactttgatgcttctaagattttaatctgaaatttccatgaagctttcttagccatcttttgtgaaagacttgcttcccattatttagtctgtctgagcagatgcagaagtttggatgaaagtgcttttcctgctttagtatcaagttatcttcagaccctgaccctgtagtagaattgatgaggtaagagaagatggacttttataagccttgtgacttttggatcacagactacaatgagatttcagaaagaatcgtttattttaacttccttggtggtctcaaattaatcttcagaaagacaaaacataatggaatctgtgaaagcttgccaatgagtctttttttttcctgaggacttgaggaatacctagagggagaaaaggtaaaaagcaagccacatttaatgtgtttatttcctaaaagggagccagtctatcaatacaacttggacttcatggagtaggatgatgttcttgtgacagatgggcttgcctccatcttccatacaacatcttaggtgggctggaggcctggtggggaagggcaccccacgttgtaggaagaaacttcactcctcaataagatccaccacttcactgtgtgaggagatgttcatgatggggctgctaagacctgcttacctgcctgtcctcttctctttctgtgaagagaaagagctgtgaagagctgagctccttgcagtggagtgagcacattctgagattctcataagtcataatgcttgcactgagaaaggcttgggagatctgcagaagcctaagatgggataaagatttagaatcttcaatgacagagtaaagaaaaacaagatcattatcacgtttttcatcccagcgactagtgcctcgggtgtaccatctgttcggctgatctttgagtattgtaccagttttagacataggtagtggattcatgagttgaacagaaaagaaagccagtggggtgtgttacatgagtcatgtgggatcctgcttagagctatatttatcatggatgggagagtcttttcagggaaactgtgagtctatctaaaattacaaagcttaccttcgttcttagggacttgtcttttcagacaacggccagagtacaaaagtaccctgtgttttctacactacttagccctgtggaagaaatgctcacagttctgttggtagccattctcgctggtctggaatctcccagaaaaatgcacactcttcattatcttggggaaaaaaaaatgtacgactttctttatcttagcacttactcgcacactcttggtccaggatcacctggcttcttgccttggttgtatttatactgaaccacccgattcctttgcttctgccctccaactcagcctgtaaactccagcaaggcaaggatactcaaggcaggatttttgtcttctcattccccaggaacttttaatggcttcctgctacctgaaggattctttctcagacattcctgcacttccgggtttagaaatatgatctacctgtttggccttctttcttgttaatttctatggactagatgtgtctctgattcaaggagtgagggtttttgatgtgctctaagcacgttcaaccatcttgaagaagccacaccagcttccagtgaggagtctgtttctattatttctttcaccccccacccatccaggtgctactgtcattcttaagtctgtccttgatgttatctcaatttgtccttgggagctggaggtggctcttaaacttgcttgtccttgaaatccaaatctttctacagtgctggtattggtggctggttttgccccttgtcagtattccctggaacacatacatcacacttgttttgaagctcctgcttttagtggctagcatccactcacatttgtgtgtgaaggagagcatgtgtgtgctgggctgtaaacttagcattccaaagtgctgggcctatgaggcaagttatatagctacgctgggtcttcaatttcttgcctgtgaaacagaggtatgtgggtaacaagccttcacatagctgctctgatacatagttaacaccaaggcagcttgatagcagtctcagcatgtctgtttggcatgcctgatgtccactcatcaactgacctttatgtatctttgacatctaatatagcccacaaagtcagagctacttaataagcatttgtctgaataaatcattataattcccttaaggaatctagacagccttcagatggttcaggggcattttcagctgaggaatcatgatggatgaaaatttcatggttgacatcattgcacaagcttctcaggacaaggtgtgaagggcctggtagctctgaagggtggaagagccttcttggcatcactacctgaactcttacgaataatcgatgtcatagatgtagcctcaaaaccaagagagtgcaaagggaatggatagaatggatggtgaataaaacttgggcagggtgtatggagagccagtctgatctggaagatgactgccttttggtctggatttgggtgcattgaacaagccagctttcttccataggggttggctcaccactgtggaagatgaaaacattaactagcagctctccgagttttgtgtctgtggagattcttttgtttttataaatggggatgtcccattatagtttcccttgcctttcagcttgttctttgaggtggcctctgagtttgaaggtgaaagtttctcttgataacttgccgtcggccttgtctcaccattgacatcactgttacttgtttaagccaagagcatggacttcctgatttctcctttcgcctgtgtcttccatcactccattcgcaaatccttattgttctgtctcagatatagttccaaatggccttctccattctaggtctatttgggttctttctgtcacctgtcttgtctcaaccacagtcattttatcactggactttcttactttcttattggttccaaccttttcatacatttacccctctaaactattttttttaatgataccaagaattttctttccttctctctctctctctctctctctctctctctctctctctctctttctctctctcactctctctttttctccctccctccctccctccctccctccctccctccctccctctcttccttccttccttcccttctctctccttccttccttccttccttccttcctttccttttttctttctctatttcttttcttattttagtttttcaagtcagagtttctctctttagctctggtcatcctagaactttgttctgtagatagagattgaccttgaactcagagatctacctgcctctgcctcctgagtactgggattaaaggtgtatgctaccactgctcagctcaaaattatctttttaaaaatatgaatatgattatgctcctgttctggctaagatgcttcagcagtttcgttttgtgaccaataaaataaaattttatagtttaaattgaatttcccaacacctccgtggcaccatgcactctggttcctgcttccttcttttcttcccctgtatgttaaccacagtaggcacctattcatacgccagatctaccatattccttcatgactccagatctttgagcttgcagcttgaaaactgaagtttggcaattacattaatgtgtttttgtaaaaggagaaagcagctttttgtacatactggtctgttacaacaatatccaacagtttatggccactgttttcaagactttgggaaactgccccacgacctcattaaaatgatcttcaagtaagcaagttcagtaagcagtttaactagatttactgactcagcagtcagaaaattaagagatatttttattaatcttaattttgaaatgtttcttttatacaaagcaattgacataattgcccagaaagtctttgtcaaaggatgtgtttggtggagtcatgtttctctgtagcacccagactttggagaatggcaagggttctgtttcctccagctctatggcagtagctttcaaacgccttcacactcatatcaattccaccaacagaccataaccgaaaattaaccacaatgccatgtttagggaaatgttctgaaattctttttctgcaaaatctcagaggaaaaaaaatggaaagattttaaaagaccatttattaattaattcattgccttcctccaacaagaatcccactcttggtgaaaatgactgaggcactcaaccctgtctttgcatttcttctgataattttgttatgctgctggtattcaaaattgaatcttttcttcttgttcctttatcctgtgtaagtattggtttttttcccccaattttacgttgcatatctgttaacctttccaaaagttctgtgccctgttctgcaaggaaaaacccaatatttcatgaacatttatcaaagttgattttgtatttggggaacattttttggtgtgtgtatgtatttaattatccccaactatggcttttcttttgaaaaaaatcctttttttctgtcaactctttttcttttcttttttttttctttttttttttttggtttttcgagacagagtttctctgtgtagctttggagcctgtcctggcactcgctctggagaccaggctggccttgaactcacagagatccgcctgcctctgcctcccgagtgctgggattaaaggggtgggccaccaacgcccggctatatggagatttcttattaattacgaaagctctgcttatagtttaggtttgttcctaactagatcttataccttaaattaacacattttattaatctatcaggtagctttacctatcttccttcttgcacctcctgtttcctttctgtgtctcttggtatctcctatacaagtaaattcctccttctcttcctttccttacccagaaatctcacctatccctcctgcctagctattggccatcagatttttattacacctacacattttcacacagtgtacaatgatcccacaataagaaagaggggcaggcttaaacaggtaaaatctactggttttcctgggtctacatcttcttctggataatgctgtgcctcacactttaaactaacttttcaaaacctgtctttattctcgtatacttctgaatgaatgttcacttgtgcctgcgctatgttatggctgtgtctatagtctgaagcattttccatatgaacatttccaaaactgataaaagagcaccacgtatttcaaagtttaaaaacacttacatatgaagaaacatttcctaaagagtgaactcttcagagatttgcagaaggatttgcacagagcacaaataaggattttggataaatttcttaactttcacccaaatgtcatagtggatatagatcatggtttcagcaaagtctttttttgattgtgcctggaccatctctatctacttgatgttatgacttccatgtagacttgggagtagttataatagaaacatggaagaaattcaagcacaaatcccttctttcaagtgtgttgtccttgagctcataattgatgtcataattgagctcattacactaggaatggatgttacatattagtggagtaagtgttctgacacagaccaacatacacaatgacagtgtgaggagaactttaattgatcacaagcccattctagaaacagatgtgtgtagctcagtgtatcagttcatttgagcttctatagcagaataccactgaatgtagatttatacaagttactttttttagttctgaaggccaggatgtccaagatcaagggcagagagagctcttttaggtgagtaacccttcctgtagaagatggccatctttgggtccttattgagttagaagatcatctcttcttctctgattctacctttttcttgagactaggtctatattctagacttgtctgcaactcactttatagtgcaggctgtactccacctcttgattcttttgcctgccttctgaagtgctgtgataacaggtgcataccatcacacctggctcatgcctgctgtgaaataatccatctgtatactgtgaaaatgtgttgctctcattgttaacaagaagttgattggtcaatagctatgcaggatttggggccagagagaatgctggaagaagagggtcagagtctgaggagttaccaggagacactgagggagtaagacatactggaggacaggtaaagccacgagccacatggaaacacatagattaatagaaattggttaatttaagttgtaagagctagttagtaataagcctgagttactgcccaagcatttataattaatatttagtctctgtgtcggttatttgggaaatggagggtgggaaaaaagtcggcctacacattcctcttctgtaaaggaactaatctcgcttgtgggaactctgcttttctgacacaattactgcccaaaggcctgatttgcacatactgtcttgttggagattaggtttcaacatagaaattttggaaaataccattattgactctatactgctgtgtctgcacatcttggcacctgtttacatacatgctgtcctaaaaattaatttctgtataggatagggcttattgagggatacataataaaatttactaatgggtatagcagtattttgaggctgggactgacagctcgcaaataatgacactgagacttattaattaagaaagcttggcctttaacttaggcctgatttcaacaagcacttttaatttaaattaatccacatttttattaatctacattttaccatgtgacttttacctttatctcattctgtgcgactaactggatttgtgtctggctcatctctactttttccttcccagaatcttctctgtccctggaaattccaactaaccacttctgcctaactattggccattcagtgtagtgataattatttatgatttattaaaacttgattgaagattctgtaaagtgaagtcagcctcaagctatagagatcaggcagtggtgatacacacctttaatcccagcagccagaaactaggaggtgctaatgcacatttttaatcctaggaaccaggattaagaggtagacagatctctctgagttcaaggccacccagatctacacaagaatcagtctaaaagagaaatatagctcacacctttagtcctaacattagggaagtatataagacagaagcaaagtctcggagagacattcatcctccaaacacactgaggaaaggttacagtctgaggcttagtggagagctcatgaagacaggaccaacccattcagcctgaggtagagataagatgctattggctagctactttgcttttctggtattcaacttgaagcttgagccacaatatcagtctctgggtcttttatcgattcgagtagcaattcagctctttatgaaaccaatcagaaagtgacttggcaaagatacatcttcacagtgtaatcaaacattcttcagcaaaagggtaacatacatataatatgaaaactcaacagtagttacaacaattgttttgaatttgtcagaaacttttttttctgtgaggactattgtgtcattgtttggaatctccagttcataggaaacatgaaaagcagaccatgtatcaccagttttattaaggcgttcaccatttctagagacaacacagttctctatcctcagggcacccctcctgagatcagtcttgcctggctttgatacctgtactgatctcattgtttaaaagtgcccccaattccctttatctcctttaagacatttacaacactttgcaattttgtttcttttatgtggtgtccctctggtctactagattgtggtcagcatttctcacaaaggaatgaactacactctttttgaacatctagatgttcagtgctcagtgcagtacctgacacatagtacatagaaaagaaatatctgtggaataaactaataaagcaagattatttttagatgagtttgtaagaggagcaaaatctctagagatcagcaattcaaggcagcaattttattcccaactctggttttattactaccagtgcttacaaggttagttagtgatactatcattaaaggtggtcatcaaaaattatatttcattaaataatttctgctttctttcccttaatacatctagccagcttgtattttagaggagacagggtgcacttggatagtatggtcacagattttttttttaatttatgtatgtgagtattttgcctgtatctatatatgtgcaccatgtgcaggaatggtgccttcagaagtagaagagggtatcagagtccctggatctgagttatagatgggtgtgagctaccatgtgggtggtgtgaactggatccaggtctactggaagagcaacaagtactcttaacagccaagtcaactctccagccccattttttaggtattataagtaaagatgacgtagagcacccaggaagatgtgctcagattatattgaaacacattgtcattttatgtaaagaacttgagtagccacagatgctcctgaaaccagtccccgtgattgtgcaggttagttggatagcccatcagacattttgatttcagacctgtagaattcacaactataagcaaaataatgtctgttgtttttagatacctagtctgtaggaatctattacaacagacccagaaacctaatacagtagccttgagttattctcccagagttttgaccatatggataaatggaagtactagaccgtcataacctacctctctcaggaatgaaggaatcgaaatcctagaatcctgatctgttgattgaagcttttgcacagcaggagtgaactcctgaatatcaactgttgcagagttgtgtttcaaaagacttacactgtctttcagcttccctggtgcagggattacgtacctggcttttatgtaagctctgaggtttgaactcagattctcaccattgtgcagcaggcgctttacctgctgagctatgtctccagttctccagcctctagactccaattgcattgtatccgggcaattggaactgtggcaggacactgtgggtattcataaccctgccaggtgactcactagagagcaagaagagcagtgtttgcatacatcaggttgggattaactaacattttaattaaagaaccacaggctacttcacaaactaaagaaatgatagttgcatcaaataccttgaactaagccctgtgttatttgtctcactatatgataatagcttgatgttaacatattaggatggctttttgtctgatgtagatggcttgtgtatttgtcatttaaaaaattgggtcacagaaaacttcaggagtctttattttctttttacctataataaacacttatttttggtgctaatattaagtacatatagacacaatactcagcactttattgaatgtgctaaaatccaattatatgtattttaaaatgtaaatagaaagtagaaagatacaaggaatacttatgtatgagttgccatgttttctgtttctgttgtcatagttttaaccatcccaggatgaagaaaagtgaatatgtgtgcacatatctcacgttagttgattctgagtgtatttaaaagcacttactgcttggtaatggatttgtaggttcatggttcttatctgtcaagagaattttagaagggcaacaaaggaataaagcaatcatggaaggaagaggaagctgagttttagtgtagaggtatgatgatatttcatatgtgtacttgcctgtacttctgctgatgtctgtttcttccagcttggacattttgtctctcctatattaacaagaagtggcaaagtcagcatatagaaactactacaaccaccatcatccagtattttgtcttaaaagtaattgaatttctgtggttttagacatacaaggattagaaatcatgccccgagttctatattgattcatctcactttgttcttttttcagtttattccctcaacacatttatattgaacatttctaggcactggagtactcctatggctacctgacaaccaacttttaaaccaaaaaaatatagtgggcaaaaacatagatttttgctcaagtgggtagattcctaccctagtggatcaatttttttttttttttttttttttttgcaagagcagacaaattcttagggaataagggtgttttttgttacaagaacagattgttataaacaagtctgcatcttgggacgtttccctttcacaaatctaccttttttcctccttctttctaacataaattgaatcagctcaaggcactcacacaagatgccacccttgattatccagcttccaaaactgtgagccatagtaaactttagtttgtttacacaatacttggtgttttgttacagcagctgaacatgggccaaggcagggaatctggctgaattggttggatttggtgtatattttaaaggtagccgtgactggatgagttgttggtagcccaagaatatgcaaggataaaatgggaagattcctaggtttggggtgggagcaatggggttatggttaatgctattcagtgatacaggtgaaaaatgaagaaaggtggggctgcttaggactgcgtgagtgggtatacaaggagcaggcttcaccattagacattacagaagataatttcaggtaataacttctgaaaacaggggtccttaagaaacactgattcttgttccatatgcccaaatggtggcagaaaaggcattccatacagcatgcatacttgactttagattcttcatcctttatgtattggaagtgatagtccctgttctttttacccccacaacactaactgatcagttgcactgggtgttgtctttcatttggcgttagaacgtcagagtttgagtatctgatggtaaattatcactgtttttatttttttttatttttggagacacttgcattagctttcatgttgctgtggtgagtacttgagaaaaataatttaaaggaggaaacatttattttggttcttggtttcagggatttcagcacatgcttggctggctctcttgttgtgtgtaagtgtgagacccaacttcatagttgcaggacagcgtatctgggtgatgtgatgacagaatacaaattcgaggatctcttataaactctgcttccttgggtcttgttgattttggacttgtgtagtttgaattccaattggtcttaataataaaaactgagagtcagatataggggctaatgctgaatgatcagagaagcagagaagtcagctgctagttcttacctctactgaatcctcagaccaaaggagcgatgctatgcaatgagctcctgtctcctcccactttatatgcctctttccacccagccatatcgctcctgtctccacctccctagtgatgtaattaaagatgtgtgactcccaaatactgggatcaaaggtgtgtgccaccactgtctggcctctgtggctaactaatgactagctctgcattctgatcttcaggcaagctttatttgttatagcccaaataaaatatcaccacagccttgactattagatgatgttatatgtaaaagagccatgactaaattttaaaagtcaagtataactatctatcttataaaattggggcattttatgaaatctgaatgagttacagtcagatagagcaaagattattaaatcggtgtcaccaaatgttactacttatggtgtggctctgcctgttttcatatgtagcataacaaggaaaggacaagaagtgtcgagtaagttgacagtgtgtgatttgaatgggacatatgtctcatgggtttacatgtttgcacactttgcctgcatctggtggtgctgatggggaggtttgtgagacctttggaaagtggaacttgctagaggatgtatgttgtgggagattcacattgagtttttataactgtggtggtttcaaagaaaacggctctgaaagggagtgtggcactattaggggttgtggtcttgttggagaagtgtgtcattgtagtggtacgttttgatgtctcatataagctcaagccatgcccggtgttacagttctcttcctgttgcctacaataacaccaccccactttctgttttcccttaccttctgttttgctgatacaacgaggctttgcgtgcttcatgttcctgctggcatgctttccctagcatgatgggctacatcatatccttctggagctaaaagccaaagtaaatcccttaagttgcttttctatttttaggacaatagaatatgacagaactaaagggttatgacttttagaaagtttagcaaaagttggaacatccttcttagaaaaaggtccttcagacaagaagtaattggcatttacttcctaaggctgatttaggaagtaagcagactgacaagtttcaggtaactcctacaacttacaagattcacatgtctcctccccaggttacacaagcagtgacaaggctggagagaaaagactctcccatatgccaagctgtctgctagtcatcaaggggagctccaggatacagctttaatcttatcacctatgctggggtaggctgttagtgatgcggctgcttttgagtcatccatgcttctttgggtaaccccaataaactcttagatcacagagccagacatgggtggagccgtgtctttgctctgtcatctataacccatttattgtgaagaggcatttgttcatgtcttcctagaaaaacacacagcatcaatcaagtatcttaattcaattggaagaagtgttttgtaggttttctttttattcattcattgaaaaacatttagtggacacctgcggagtatagggaagtaacagtgaagacatatttgaagagatagggaaaaaggatagtaaaaatcaaattaatatgcatgattatttaaattgatataacaataaatactacacatatggcaaaactggatagtaagagctggaatgacttaggtacaggtgagagaggctataattataggatggagccttccttgaagaactgactaaagttgaaacccaactaataataagaagccaggtagaagatattaaaggatgaatagtgcactcaggtgctaacttcaggcaacaggtttagaagaatctgagactgaccctgaggccaatgtgattagagcagagtggtggggtgctttcaggataaaaggtcttacaggccacagataaggatattcatttcaaggcaatagaaagccatggggattttagcagagaagtggcatggttcttaatctatgcattgaaagagatagtttcatgctcctgatgaccagcgattaaagtcatagaacccaacataaagtaagataaagtgacatgagtctgtgatccccgcgctcctacctactgatgggaggtagagaggaatcagtgggaagcttgtaggagaacagtcctgcctggggtatgagaagtgaaagaagcaacaagaaagacccagactcagcaaggtgggagatgatgaccaggtttcgaaagttctaccctgatgtccatggatacgatgtggcgatacaccccccacccccgtgaagtttaactatttaatgtatgtgtgtgtgtgttcctgagtatcgtacatggacacttacatacagaagttcccagagcctagaagaaggtgtcagaccacccggaactggaggtacagaaagtttgagctgtcatgtgggggttgggaattaaaccctcatcttttgcaagagcagtaaatattcttaacagctgagccacctctccagcacctcataaaatctggacagataggagctctgtttacaggctgtagaacttaatagaacaaggagatcattctttggagactgccactttagtcctgatggaagactgaatgagcgtgagtttcattagaagcaaggcttttggggaaaatcatgagggaaaatttacagtagatacagtagtcaatcttatacccaaacttagttacatttgaccaacagtgatccacaaatactagatgtaaaaattcccggaatgactgattattttcaattactattatcataggatggtgtgacaattcttctactttattattactgttgttgatttcctattgtctacgacattattaagttatgtacatataggagaaacatgatgtgtatatatttgcagtttaaacctttcaacttgggccttgggaaatatcgactataaataaagaggctcctatatataaatgaatagatgagaatggaaaatgaagaaagaggtatcctcaatcctgtattattggctggtataaacagaaaactagagaggagaagaaaagaatataaaaacaaaccacattttctagtgtaagaaccttgaaaagtgtcaggaattcccttgagcagaacttcagggtgggaaagcctgttctccttttacaagaggaggatctgccatgacatgtgtaggtggttctggttgactgaggacacctgtacttgtcacagtgttgtgttgggattcaagagtcagagacaggcaattatgacacagatcctcttatctgactatcaagtatggctcacagagagagagagagagagagagagagagagagagagagagagagagagagagagaaatacaaagattagtaggcataaagtaggtagatctggccacccactaaatagtccagctgccttggagttctctctacgaaagatcctaaaaatttcccaaatgtggatttataaccaacatctcagcttgctagagcatactatctaaaacagtggtctgtttcgttctgggagatattgatatctgtaggcactttggttgtcatagctagaggtggctggtgaagtgctactgggatccagtaggtggaggccaggatattgccaagcatttcacagtgctcagaacaaccctagatcaacagacaaaaggtcctttacataaatgttgagggcgagacactgtgacataaaaggaatagggcaaaagttaagactgttgcttctagagggatcacggcaactgcacccttcctacttaaatctgtttttgtgttttccaaatgtttaccatgaaactctcattttccaaccattaagcaaacaaacacacctttcagagctaaaaggcacacatgaccaatgccaagcaaaagcaagtcttcctggttctaagtcatgcttctccagacagcatgtgttgggcctctcttgttgagtcatggccctcaagttcagcctgactgatatggggaacctcaggagaccttagcaaacattcaggatttccactgagtcatttgcctatgcatttgcacagctggctcaagtcttcccgtgtttttgttgaagacagcctgaagaggaaaagcaggctgctggtttctcattgagttgagctctcattgagcaatgtcccacccctatccccccccccaaactctgtggctggtgctttttgtcctgtgtgcctttgtggctgggccagcatggagggcttaaaaaaccccaggaagaatcccttagagcccatgatattaggtaccccttatcctcagaggatatcatctaagacccccagagagtagcaaatgttgtctgcactgttttccctatatgcacagatgtagttatcatagagttcttttcaatagtttttaattacagttggctttaagcaattcaaacactgggaagtgaaaccatgaataaaagttgtgacttatgtatgcataggaagaaacttctttgaactgtaggatagccaggaggaaaacagaaactttttcactaagaattcaaattgatgacataggaaaatcactgactttcctgggaagttcctctctgtcaagacatgaaaaaaccacaaaacaattaaactaaaaggcaacccttttacagccccgccagaaggccagtcactgtcattattttatcttgatccaaccaaatgcaagtcacctctgtccctcctcccacacagcactggcacctcaatggttcagctcagcagccaatcataacattaaaagttcattaaataatccaggagatgctgtttttgagattccagggtcacaggaaatggtgacctggattatctggatgaactgtcacaattgtgcactgctttgttcagatacagcaagggctgagatacactcaaccaaccagcgggtgtggacttcacgccacacagcaaaatcgaattttaggctgggtgatttctcatctgttccctcttgcttttttctattggaagcgggcagatagcttcgcctatcttgtttctaattcatcttttgaaaaattggtacgatagtggttatctgaccgtgtacttgtcaggatgagttattttcaggtactttacaaataaaaaaatgtagagtaaacttcacagtcatccagatgtaacaccacctgtcttttgggggacactatagagtccctcaaattccaatctgtttagccccagtcttgagcaatcatttacaactacagtttctgttttaaaacgtcccataatttcttccttcaacaattctttggattagaaaaattgtataattaaaagtgtacttttaaatttctaaatgggagtccccacttcacaatcatagatactcttatttggaaaggtgaaggtttattacagtcatgttggttttcagtttgttttcttactgaactcaaaggaagacgttctgatgtgtagagagaatctcaatggtttttctcttccacgcggactttgtttcaactaaagcacttcattaattatgtttcttatcactgtgacaaaatgtttgtttaagtaagaagggttagttctggcctatagtttcccatctatcttggtgggaaagtcacggctgtaggagtaagaggctgatggatcacaacacatctagagtctggaagcagagagaggttaatgcctttctcagtttcctttctcctcttgtttagttcaggacccagtccagggaatggtgtcctccacattcaaggtttgtcttcttatctcaattaatctaatctagattttctatgtgctcagagatgtgtctccctggtgtttctaagtcctgttcacttgacaatagagatcaaccctcactggcacaaagatgaaagcttacatgcttccttcatttaaaaatgtaaatatcaaactggggagatatttaagaacacttgttgttctgttcttctggacgactcaacttctgttcccaggactcatgtcaggtgccttagaactaactgcccttgactccagctcccggaggtccaacacaaccccattctggcctccttgggcacccacacagatagcttacacgtacatagacatatacatgtgaagtaaaacaattttttttctaaaaatacagcaggaataaaccataaagtaagatataattttacataaacacagctccagctttttaccagaaagttataaggtccccttttgttgccacacctttaaggaatggactaaaattccacccattctaatgctctctggaatggccagaacaggttctgagctcatctggtgcttggtgttcctcctggggaaccacaaaagagaatgatattggtttggaatggagattcaggaaggaaaaacagatgtagagaaggaactgctctaacttgcatttggaatgccgccaaagacccacatgttaaaggctaaatcttctttgtggtgctattagaaagtgataaggcctctaagaggtgaggcctagtagattttctggttaattggagcatgcccttgaaggagacattgggactctgttcttccttttctctttcattccacctgctccatgctcccaggacatcaagctttatctgctccctattcgtagttgtagtgtgctgcctctccatggtccccaaacaacttctaaaactgaacaaaatacaccttgtttttttctgtaagttgattactccatgtatctgttacagtgacagaaggcaatgaacacaggaacaaacctatgggatgggttgagaaaaaagcctacaaaaagctgccaaacttctgaaaaatgtggcattgtgatggtcacaaaagagtgtgcttagttttggggaacatggaaataaagacacatagcatttattataatccaacccaaaatgaatgctcacagaaacaaggtagtgatcagcagctgtgccaaatgtgatggacatgaaggggtatccagatagacctagcaactaggaggtaggtcattgatgatggccataagatcagctgcaatgtgtttaggagggattggttggtgtggaacataatgttttcaggttgagtttaggaaagaattgtctgaaaatctttcatttagctgaatgatatttattcatctttagatgattatgataaaagggacccctgggacagttgtgtctttgattaaaagaaaaataaacaatggttgtgtctgataaccgtagcttatcactcccatgtttacttctacatttctagagcttattgttgaaaacagtgattatctcagtatccacaagatacggatgttaataccttccatacacaactctcaaactcagatgactggatgaaacaattctctcatgaatcagagttattaccattcccttccttaagggaaacgtgtacaggtacctgtctactgaaacaatgctgaatgtgccatggaggtcacatgtaaatatctatggcccttaacatattggaacttggtcagataaaagataatactcttctttgtcctgatatattacaactttgcctcacttatctgacctttgctctttatctctgtgatagaattactgttcttttttcctactctgagtgttaatatctgtctgtttcctcaaagatgtgttgaatgcctttctagattctttcaattaaacttgtgaaaaatttttgagatgggtctctctatgaaaccaaggctgaatttgaacttactatcttgccccggtgggcctgcaatctgcattgagtctcttgcctcaacttccgaagtgctgggattagaagtatgtgccaccatgttgtttataaactctatcatcttattatttacattttccctgcttccttagatctctttagagatactcattagagatatttagatttgaaattccccgaaaacaaatgttccccatcctatatgggacaatgacaacatggcaatgtttctgggcaactgatagcacagataaagagaaaatgactaatctagttttaagtttctcctccaaatttctgaaagatgtgttagaccagtggttctcaaagcagtcggacgacccttacacaggggttgcctaagaccattggtaaacacagatagttacattgtgattcatagcagtagcaaaattacagttatgaagtaggaatgaaaatgattttagggttgggagtcaccacagcatgaggaactgcattaaagagttgtagcattaggaaggttgaaaaccattacattagatgttcattgaagcagcataagaattaaacacatgcacagggaactgtcagtttcagaaggtcatagtcatggtagaaaaggctgataaaatgaaactggcattttattctcaccatgagtcaaaataaataaatcagcaacatcgacaaatagcactggacaacatttaatagaaattgactccaatccaggcaatgatttcagcttacttctcatcagtgtatgaagtaggacccaatcctattttacagcagttgatctgaagatcctcaatatgaaggggactggaaaacacacgatagaggttgtcagttgagagatggaattaaaatccaggctgtcctcatttcaatctctattccacaatcccgactcatctgcttttctagttttagacattcttctgaagcctgaaaggctttgccaaaatcggagatgttaaatggtcccacatgccaatgacagttgtaacatgatcaacacacacacactcacacacacacacacacacacacacacacacacacacactttagtgctttaaaacacatactggcaatctattaccgacatgattgccctgaacatggattcagtcatcctttaagaagactggcatttagcctattgcccctagaatgcaaaatgaagttcttatgggtgggttataataaatagagcacttttgtggttttgaccattgatttttaaactacatcactctaagctcttggttctaccaagcatggttgatcctgtgttcagttacattatctgtcaatttgctaactcacaaaattcatggaaacagagtcatatataatttatataattttaatgtaacttacatttaaatgtttattggtacacttatgttccatgatatactgtttaagaagcaatgtaattttgtgacacttggaagtctacataggagaacatgattgaaaatacataaaaatgatgaaaactagaggaaagctagacaatttaatgtgattcaaaaatcattctaaattatgtctgttttgtcagattttatattaggaaatgaaaatcaaaaaggaatataacctcatctgacaaagatttcctaattgtcatatcaatatgtaattattattagctaattacatgtaacaataggttctttgtttctgcctggtcttgatgcccttctcagccccaaataaactatattagttttaaatctgttgaccgatgactagggcttcttattggctagctctgtcttaattattaacccatttctatcaatctatgtatttccatgtggtcttggcttacaagagaagagtccagaccgtttactcctttggtgggctatctggcaactgtttctgcctacgtttcccagaatcctcatcatctcctaatcccacctatcttcctgcctcattgactgaacagtgttttattcatcaaccaataagagaaacatatacagaaggacacccccattaattacattataaaaaaaacttaaagagttcactagtttaaaaactaggtaataacaattattaactgtggtttggaaatatagacggtgacttgttgccttattgagataaaattgtttgcagatagatttttctttaggcttccagctcatgaaaaagacatggagatttattattaattttaatagtgaatgttaatatattatcataattaattatatcatatattaatattataattaattataatagtaaatattacaattattataaagcctatagtttaggcttgtcccagtaaatctttgtttttttctgctcttagttattttcagtattctctgtttttttctttttttatattttatttatttcttttatttctttttttcttagcaagaaaattattttacatgtcaatcccaggtccctctccctcctctccttccctaccgcctccccccccccccccaactaatgccctacccatcccataccctttctgctccccttccataggagggggtcttcaaatctgtcatattctttgggatagggccgaggccaacccccttgtgtctaggctcagggaatatccctcgatgtgggatgggctcctaaagtccgtttctatgggttgcaataagtactgatccactacaagagaccccatagatttccaaggtctcctcactgacacccatattcaggggttctggatcagtccaatgctggtttcccagctatcagtttggggaccaagagttttcccttgttcaggtcagctgtttctgtgggtttcaccagcctggtatggacccctttactcatcagtcctccttctctgcatctggatttcagtccagtttggtgtttagctgtgggtgtctgcttctacttctaccagctgctagatgaaggctatacaatggcatatgaattagtcatcaatctcattatcaggagagggcatttaaggtagcctctcctctgttgcttagattgttagttggtatcacctttgtagctctccagacatttccctagagcctgatttctctttaaacttataatgtctccttctatcacattatcttttatctattctgttcttcccccaactcaacctccctgtcccatcatatcttcctcacccctcctcttctccacttctcattctcctagttccctcctctctccccccatgctcccaattttctcaggagatcttgtccctttccccttctccagggggccatgtatgtctctcttagggtcctccttgtttacaagtttctctggcaacctgggctgcaggctggcattcctttactctatgtctaaaattcacatatgagtgagtacatacaatgccggtctttttgtgactgggttacctggttcagaatgatttcttctagttccatccatttgcctgcgaatttcaagacttcattgcctttttttccccaaatgtaccacattttttctatccattcttcagttgaggggcatctaggttgcttccaggttctggctgttacaaataatgctgctatgaacatagttgaacagatgtccttgttgtagaaatgtgcttcttttgggtatatgcctaagagtagaagggctggatcttgtggtagactaattcccattttcccgaggaatcgccatacagatttccaaagtggctgtacaaattggcactcccaccagcagaggaggagtgttcccctttctccacaacctctccagcataaactgtcattggtgtttttgattttagccattctgacaggtgtaagatggtatctcagagttgttttgatttgcatttccctgatggctaaggatgttgaacactttcttacgtgtctttcagccattttagattcctctattgagaattgtctatttagttctgtaccacactttttaattggattagttggtgttttggagactagcttcttgagttctttgtaaattttggagatcagccctctgtcagatgtggggttggtgaacatctttttccattctttgggctgctgttttgtcttgttgactgtgtcctttgccttatagaagcttctcagtttcaggaggtcccatttattaattgtggatctcagtgtctgtgctactggtgttatgttcaggaagcggtctcctgtaccaattaattcaagggtatttcctactttctctgctaataagttcagtgtaactgggtttatgttgaggtctttgatccatttagacttaaattttgtgcatggcaatagacatggatctatctgcagtcttctacatgccagcattcaattatgccagcaccatttgttgaagatactttctttattccattgtatagctttggcttctttgtcaaaaatcaggcgttcataggtgtgagggttaatatcagggttttcaacttgattccattggtctacctgtctatttttgtgccaataccaagctgttttcaggactatagctctataatagagcttgaaatcagggatggtgatgccttcagaagttcttttattgtacagggttgtttgcgctatcctgggtcttttgtttttccatataaagttgagaattgtttttttcaagttctgtgaagaattgtgttgggattttgatggggattgcattaaatctgtaaattgcttttggcaagattgtcatttttactatgctgattctacctaccaagaacatgggatagccttccattttctggtatcttccttattttctttctttagagactcaaaattcttatgatacaggtctttcacttttttggttagtgttaccccaaggtactttatgttgtttgtggcaatagtaaagggtgatgtttctctgatttctttctctgcacatttatcatccatatatagtagggctactgattttttttgagttaatcttgtgtcctgccactttgctaaaggtgtttatcagctgtaagagttccctggtagagttttttggttcacttatgtagactatcatatcatctgcaaacagtgaaagcttgccttcttcctctccaatttgtatctccttgatctccttttgttgtcttattgctctagctagaacttcaaggacaatagtgaagaggtatggagagagtggacagccttgtcttgttcctgattttagaggaatagctttgagtttctccccatttagtttgatgttggctgttgggttactgtgtattgtttttattatgttcaggtatgttcctgttattcctgatctctccaggacctttatcatgaagggatgctggattttgtcaaaggatttttcagcatctagagagatgatcatgtggtttttcttcttcagttggtttatatggtggattacattgacagatttttgaatgttgaaccaaccctgcatcccagggatgaagcctacttgatcatggtggattatttttctgttatgttcttgggttcggtttaccagtgtttcattgagtatttttgcatctatgttcatgagggatattggtctgtagttctatttcttagttgtgtctttgcgtggcttgggtaccaaggtaattgtagcctcgtagatcttatagcttaaattatcccatttctactcatctacgttttgctatatgaatcatggcttttacctcttctgcatgtcttgttatttctgtgtctggctggcaaccccacctttcttcttcacagagctctctctgtccagaagtccatgctatgcctgctgcctagctattggctgtttagttttttattgacctcatcacaatggcacatcttcatacagtgtaaaggaatagtccacaacaattattatttattcattaattacttgtcacattattgagacaggtttactttgcctcatcggtcaagggtacataacagtctgtcatggtgcagtaggtatgatggcaggagcttgaggtagttgaccacattgtccacagaaagcagagatgaatgcttgtcctcagttcattttctactttgattttatttagtccaggcccctaaccttggaatgatgcacccacatgttgtataggtcttcctatctcaattaatctaatctaggtcattccttacagatatttccagagactttgtctctttagtgattgtaggtcctgtcaagttcatagtctgtattaaccgccatcagaagtctaatctttatcaatttggccattccataatgcaaaatgtattccatctcacttcaaaagtaaccctgatcttttaaaaattctaacactattttaaaatccaaagtccaagtctcttcggggacttggaacaatttcttaactgtgagtacctatcaagtaaaattaatgttatatatctccaatttatacatgcctcaaaaaggacttccattccaagaggaaggaatggaagcatagcaagaaatgattgggccaaagcaagactaaatctagtaggtcaaacaccaaatgtggtagctttatgtccagcatctgcatcttgtaatggaatcaactgggcgacaaaggtaaccccactcctcccattttgccagctatagcgcacataggctctttctttgatgtccctactgcatgcctgcagttctacttagtgtgctgttaaaatctccagcatccatattttcactagaaacttaggcttcatacgaaggcttctaggtgcctccttgtagtaattttgaccctaccaaacacttcatggctttagtgactctttggaactgtggtggctgacaatcaagacccttttaatcttgattttttttatgcctatagaaccagtatcacatgactgataacgctcagttatgccaccagctcaaggatggagcctggcacctttagatcacagtagcattggcctttaattggggacacattttcctaggcagttcctcttgagcagggaatgaatttagtagcctcttaagtttgggctctcttatttaaaatggatttgcattttccagagtctgagcttctgatgagtgggctattgctgggatgaagaagggcagagtcagggagagctgagccagctgccacagaagcagaatgtatagaaaatgaggtaaaggcatggtccacatgacaatacatagattcatagaaatgagttaatttaaatgtaagttccagttaataataagcctgagctataggccaatcagtttgtaattaatataagcttctgtgcttgtatctgggatagaaaagattctccttcatttacagagactcttgtgcttaccttgctttctcctctttagtgtagccaatagcccatgagatactattaatatttcatttagtctaattagataattccttgaaatcatatctagagactagctttttcagtggttcttgactctgtttgagtgacaaccagtattagccactacagtgccccaattaaggtgatttttaaacagattatcaaataatatatgactgaattaaatctttgagagttgtcagagaaaatttgtaaattgcattaaaatttgaatgcatttgaattgtctctaagaaaaagtcgtaagttacaaggtagaaaatggcttttggaatagaatagtgagaacttggggaggtatagcacttgaaaaccatgaggatggggtgggtgaacatgagagaatgttagatagagatgggattcaggaatttcttacaggtcagaagaattctgccctagttagagattagggagccacatggtggttagacaatcaccagcttcatatttcataatgttcctttggattgtcataggaaccatggagaaatgggtgacagtggactctaagggacaaagaagtaacatggtggtcatgggttccataagtagttcatttcctcctttttcttctttaaagtaattagaaggtcattgaggaagagaagaggaaaggtgatgagggaaaagagcagctaatgtcttcagcaacttatgatgcttttgttgagaggaatgtgagaggcaagacaagtcagacaaaggagggagataggggactccaatcacacattgttgcagttagaatatgtattgccctcaacaaagaatgagtcctttgaagcagtgagctgaaatacttgtttcttcccttatcctgtttcaatcgggtattttgtcatagcagtgaagaaagaaattcatacagagggttctgtctttgagatgctggtggaccatcctgtgtttggagtgcaatttggctattttctaggagaacacagaagacctcgtgataactctaatgatatgcatcagttatggttaaagaagaaactccaaggtgcacaaatagaacttctgttttgccatctagaaaaagtgtatccctaccactgctattttgttgttgtttgatgggatcagctaaaatcctcccctgttatttcctaattatggtgaccaaggaaaaacattaagttgagttcataaaatttttggctacaatctggctgtaatgataattgtacagaatcatgaaagagcaatattttagcttaagagaaaacacactttatcctgattcatgtgttcttttgcttttctcatctgatgttgcttgatctttatttttccactttgaatggtggattctgccaagtgttctaaaaagcctttctccttttaggggaggagagaaatagtttttctctcccttttgtgtgatagttgagaagtgaggatttaattggtgggaaaaatacacacacaacaaacctcagaatgttcccccatggctcttaatacttgatgtgcctgacagacaacccttacaaaacaggataatgggataggtggtgctggaaaaaatcttttctgtccaactcaaaaccacacagtcattgaagatgattcccattagcctagatatttaggggaacatgtccgctgggcatggattctatagcgaagggcctcctctcccttaagcacattttccaggctccctccagtaggcagaatgagaagttcatacagcaggaaattgggcatctggcaatggctgcagatcctgctactttgtgggattgggcaagattcacctttccatatctcagcatcttcatttgcagaaatgagtggttgcatctgatacttctggttttatctagcaccaaacacaatatgtgtaaaaaataactactgggtcagcttctttcacatgtgcttttacattcagtataaattggattaaaataaaataaaaaactagctcatgagaaaacttagaaataagaaatttactgagtgtcgggcatccagtgaggaggtaagagtcaagactttattttgaacaatttctgtcatttgactagaagcacacaaagtatagctgcatctgaaaaatagaacactgcttatatgttcttacccaggcaaaagtggaaggcgagcaacattgttaagaatgaaaccgagtctttaggacctgatttcttagcacttagattagacattatcttgaaagtgattatgaagaggttaccgccaagaattgggcctgttcttatcctgtgcagattgaaggagcatcacttggaagctgagaaaaaagaatagaacaccgactctattgtgcaaggaggttgctcacaaattgtaagactggaaaatgtttatctctgtccttgttttatagcctgagtatcttcaagaactagcatttgttctttgctggttcatctatacatgcacttatttcaccagtgagtgatggacctgtcagtagaataagttgagagacttggactcatattagaagtgtggtctgcaaagggaccagttctctggggcaacatgccgctttgccccatctgtccctttgaaagccgtggggagtggaatgtctaaggctagggacaagtgatgcagtgaggtcaatggaaaaggaagggagatcccagatcctcaggtggggttgaagatggcaaatggattacagagttcaaaaagcaatgccctgtggaaaggggaaccaacccaacaatggtggcatatgaaaccaggaggaacaggaagggagaagactttgctgtgacagttgaacttgctggagtctttcaacttgtgttgccaagaagcatattttatgctttctcctggtaactagagagattggacctggaagcccccacccaacatatttatctgctgtttgggtttgtctctcttctgtaagttctgttcatgtgcttcaattactttatagttgtctagtcatagttcatccaactattatgcctctcagatattacaagttaggggtagctttccctgttcagccccaaacatcaactgttgaacatttagtcagttttaatatgtccttgggggagatgaaagttgattcacaataaggaaggatgacataggcagatgggcagtgtacgccatgaatagggattccaggctgggacaagtagaatcaatatactacagtgacccagaatggaagagaaaagggacagcattgctaagtgagccctgtgcatgaaccttggaatagaatgttcctcacttgaaaccattagggaaacaggcagtagcatccagacaaggtgacttagccagaaccagcaggtcttgtttttgttggtattgtttataatgatccgaaactgctctcagaaaaaaaaaaaaaaaaaaaaaaaaaaaaacaaaaaaaaaaaacacatgactaatcacattgccctttaattagaacttctgtttctgcatcctttcagtggtatttttattgaattatttctttttagacatctccttttctccttttcatctctccccgccgcccccttagactgattgtggccaagctctgcattccactccagtgttccttagaaacagtgctttagataaatagttggattggcactggtgagagctaccaggaggtgctgtaatcaggatctcctcaagtgaaagcagtgaagggacccatggtggggatgtggtgagcattcgcacattctacacaggttgtcatccaaaccgatgcctgttcagaaactgacaggactcgacaccatggattcaaagtgggccctattgcatggcctgtttccattgtggaggctggattcctttaattctccactagacaactggatcttgtcataggtccttatttggaggaatggtggtccatgtagggatgctctttcatgaaactgtttcttgaacaattgcaaactttatccatgtatagggaaactacctatacatggattcctacctgctacctgctgactattaggagtcaagattattacaggggtcaatttaatttaaagtagaaaatcatgatttccttgtcactttctacacctgtccttgttctacaagagtcatgagaagtgagagaaaccaaatgtgaagatcttgagtttagcaagcaagggctccaccactgagccatacccaaacccaaaaatgaatctttggaattcaacacctccaagaagtattctctgaccacagacttatatggatctccctaggctccagtgtgctattttgatgtgtgcagttggaattaaccaccagctgcaggcatttacttaagcaaacaaaaagcttagacttgcaagagtcaagcatacctgtaggttcatcctcagacttagcacaatgcccaaaacctatttcagtggcttgagttgggggtagtgagactgctgtctcattggtccatatcctttggttttctagacagtgtctcctacctcccgtcatagactcccattcatcccatcttacaacttacacaatgggagataaataatgatgcacctgtgtgctgggttgatacatattatttcattttaatttttatccatgaaaagagataaagtttgaagactgaatattgtatccttaaacttttagaatttctctgaaacaagaaaattggcaacaatgacaacattgtgagcctcctggaaggcaacaactgaggggagttttcatgggcatctgaaagaagacacacaccggtggcctgtctactggccctctcctgcttagaatgccatattgaatgaaaaaaaggagtctcctaccccagtgggtggtggtacagagcctttgggtgaccctgggcccttgctctggtctctctctgcttaggtcggttgtaactcatctcattacatcataatccagggcttgtgacatttttattcctactggagatgacagagctgtgacacattagtttctgattggtgtctgtctctgagtcagtctctgaggactatgataagtgatactcggctcaggtttgtctttcccatcagctagagcaatgttcagaaatacaaggaaagcttgttgaggtgaggcacccatgagaatgttttcagcggtgatgtctctgaagtaagtgaggcaggtttacttcctgcagaaagataggaccactaggggcacagtctctattaagatgtcaaagcaggggctgaggtgtggagtccagatggagagtgcttacctagtgtgggcagggcttggatttgatactaacctcccacccccacaccatccctccttcacctcatggcatgtcagaggaagttgcatgaagctacccctagaaagcaattttgacagaagcatcaggaaacacatcccattttcatggagcaagaactgtggtcatagcaacagtcaatacctgcacttggtgaggaggggaaaacattcttcaactctgagaggtcccatagtagctcagatggctgcagccatgcaccaaataagtcatcttctctttcttcccctcacctctcccatttcctcttcttgctcctgtcttgttcttctgccttcccctctttctcttctcttgttctcttcctttttcctcttccatcttcttagaccttccctttcctgctccatcttcctctctagcaaatgcccagggcccctggaatcagtaagtagagcctcctactcacaccagtctctgtgctaagatgaatcagcaccagaatggcctgatggagtctgcccggatcctcctggcccctacttctgcccctgcactgtcctctactcaccaggcttggaccttactgtttttaatatgtacaattggtccccccccaaaaatcttattggaattattctccaagaacttttctttgtctttagggtgtaatctaaggataaacaattactgtgcagtcattggttcaagtcacaccacaaggctgttacctctaacatctttttccaacaaaatctctgttccttttctctcctatggaaacttctggatacacttgttttccaatcctttggcttctcacagcataggcaggtttaggctaattgctttgtaattctccaactactctggaagttgataggcaaagatggcacacctattggaaagtcatgtttctatagcccactggaatgaatgcaccaaaaaagacaagaagtcaaaactcaggacacttgtgttcacatgagagagagattcatcagtgaacacggtacaggcaaaggcagtgtgcaatgctacggtttctagttgattagaaagagctctcaccctgtgaagacccaagtttctggggcagcatgattgaggtcagctaacttggagcagtgcaacttcctggctaaactgtaagccaattttttccagctttatgggagggaccaggttaactcttgccaaactggttcaccaggaacaatgactaagtggtttcattttgttttatttttgcatgctgcatttgtatctgagctcagatgatctcagctgtaaacatatttacaacctggagtttcacaggagaggactattgacttggaatggaaaacaagtgaatggagttctggccaggcaggcatcagcattgcagtgtggtgttttgtttgtgctgtattttgtctttacctccaccacttactttcatcctacgggattttggggaatgccagcttcttttcagcactagtaacttctctccactctgttccacatctattccgtgtgtgtgtgtgtgtgtgtgtgtgtgtgtgtgtgtgtgtgtgtgtgtgcgcgcgcgcgcgcgtgcatgcatgtttgtatgcctgtatttcctgatctcttcacagcaaggtagagaatcctcaacaggaatattcatggccttaaccaactgtctattgatctcactggtgattaaaagcagttgacaaaggagtgatgttctttgacttcctttccagactgaatctaaaagttgagcaagctttcttccaggcaggaagccttctggagtttggacattcctgggtttgcagagctgctttctgtggtggatacaggcagtgggtcaggcctaggcacagcagcaacctaacttgcagtcaggctgtgtttcctacgctgagttgggaggatgctgtaagagtatttactgaaattggcatttccaacagagacacttctgaaagtattaagtatgttatggtttcctggacatagtcaggaattataatccatgccattgcttgtgtttactgttgagcttgtgttatcctgaggctttctcttgtctgggattctgagaaacacaatttcagaggtctgtggaaagaagctgggggatgggcctctcagaatagaaaccaccttcctcctctatagttcctgtccaaactgcctggttaatgttcttccggcttccatcactgcagttgggttgggaaaagcagtctgtattggggactttttgaggacttgtggcttttggaatttccctagttcctttatacttcttcattcctattatgctagaaaaaatcactaaccaaccatgtttccacaaagtgaggagctatgaacatatatgcatatttatttagaccttatatacgaatatagtttttaatatatttgcatatatagacaatataagcatttattcatattgaactttcctgtcttattggcacgcattctttcatgtctccaaacttttctatggctcttaatttaaaacttagtcagtcctgttctctacttcacccttttgttctctactatgtagaaccccaacttggaaatctcaggcacacttccaagttacctaggcttcagctggcctgacattcaaattgtatgactctaagaaagtcctataaacctcagaccttttacttaaggatggagccaggaatcttacttataataatgggaccctagaagatgactgctcacgcagtgtgggaatttgtgctgtaagactggactcatggattgctcctgggccatgatcccatgggtcatacctctgccctcagaacagatgaaaactgattctgttgtgttccaagtaccacaatcatgctaactcatttaatcttcaggcctgtcaattcatccttaattcaaggatgaggataacaagattcagggagcccaggtcattctccaaatgggcacaactaagaaagagcacaatgttgcgtgggaagactgtggtcaatgcaccggtaaacactctgtggcttggatcttagcagaaaagcaaactggaacatcacagctttactgagtcaatttctttggtggtgggctccagaaataagtcaattatctagctttgtaagtgctcagagttatcccaaattacccagacgtcaagaagcatgaacacagcatgcccttcatttccttactatattgtcttgcataatttttatttgtttgctcagaagaattgcctcatttgtttcccagaagttctgcgctctatctgctcactgcatgatcttatgccgatctttctcacccaatagttttattactcagacacctgtcacttcctcacaacacctgactgagtgtgggcctggctccggttttgccctgtctgccctatgtcttttaactccttcccttttgcacttatagcactgaaaacaatgacatcaagcttcttataatcccaggagtggctgtgtaagggtggccaaattctacccacagttctacttcaaatttggatttcccccaaaagaaatgtgaacgaacagcagtcttggaaagttctacttggcattaaatggtgtctctgcaaggtgagaggggagcagaatgatttctgagcatgaatctgaatctactgatccaacatggcacatccttaaaactacaatctcattcagggttggaacatgtccaagtcaaataagagatactcccatgatgctctgccttcactcaggctgttaaggtggcatcattttctgctgactattctctgtctgccctagccctatatatacagaacatgcagattgttcaagaaaagtttgattactccataaaactgtctgatccttcttcagttgtttttacactatttaggatgcattgagaaaattggttttcttccagtatcttcatcaatagtgaatgcataatgactagtaaaatagagcatcttagagttcagaatgcacaaagccatctgggatgactgctccttctctgtcaaatagaatgaagagctagagaaggttgacacacaaaaacttagcttaatgatttttagttttctacagcttcccaaattgttttccaatgctaccactcacaaaagtatttcatgaataaatattaggttatccctggccctgtgagattctcatgttattctcctcaatggctggctcctgggattgtatgctgactggaactgcagttggcatattgagatgcatggaatctatttctatcttttactctttcttctaaaggaatcctccctagtggaatgatgctagctgtgggtactgttgggtgagcattgttactgaagggaatctagctctatcacaccatgaccttgaagatgattgggtacagcctgccttccaatctgctcaactttcaaatgtattcttggtgtagtttgcttagcaatttattgccttctcatcttctgagtagcaacagagaactctataaataagcacagtaatgaggagtgactcaaaagtctggttatttttattagtgaactattctagtggcgttcactccataattttacattctcatactttataaccctgaaaataagcctgccccctcccctgccctttttgagttgtagagagtattttgaggtgtttggcagaaaacagaataagccaacagagctatcaatttttatgttgaataactttagagggaatggtgtcattatgtgtttaataataaacacacaagaatctgtacatgttggcaaactgtaagaaacaaaacatatttagaaaatttcatgtcctggctatacagctgatttatgcctttctccctaaatgtttaaaattagatctaaagcacagttaatcttggtttggataggtggcatgggtatttactgaggatttaatgaacacagaggagcagtaggaggccatactaccctgattgtgtctaatcttgtctgaccaggctctggcctggttagtgtttttgtgggcaatcaggtgctgcagtctagttaatgtgcaagagaaggctcactgagagtgagaccagcttgactccccaggaaagccacagaggctgctgagcccattctttccctgcccccccttatccacctatgctttctgtatcctaatttcctacacggaaccatggttttctgaaacttctacctcattgggtgtacacgcaagtggatgcatttgtgtgagcaggtgtgtgtgtgtgtgtgtgtgtatgtgtgtgtgtgtgtgtgtgtgtatgaatctggcaaaattgttgttttaaaaaaatagtggttttatgttaaatttttaggggaatcactttcctcagttactggtttaatgacaaagttgaagttgtccaatgtctttccaaaatcctgcttgctaaaccaattcagaaatagtcaattagctggatgtacaatctccaaattcaagtttccacagaacagaaaacatagatgtttgtattttcactaaaaccaaaccaatggtaacaagaaaatacttttcctgattgcttctcagatgcagtcttaagatgttcatgagctgcatgtgttagggacacgatcatctttgttatctaagggcaggttaaagaactgtgctacttaacgtccttcactttatttctttcatgggattcttcagcagcctcccaggcataagaaaactctacactcaaatacaaccaagacaactagctacctaacattccttgtgagaaattctgtacaacagcatttgttttgggactaaatgccaggaaaattttgcttcctgtaagcaatggcatgttttctccttctggacagtaagaaccatgtaattaaacatattttccttaatgttttggctgccaggaagttcagagtcaaacttgtagctcaaatgttatgagtatgtaaaaccctgtagtctttgtatctggatacttcgtttctctttgatattgacatttagtccagactgtataatatatacacttattttaaaatggtaaatgtatttacagattgcttaggttactatggaatgtggtagagtatcataagccagtgaggcaggtgtttagatacctggtgggtggtgtttatattctcagcttatttcattaggatgcacacctaagtgtgcatttaccatgtgtcaaacaaaggtatgccctgcaggtggttagaagtgttagagtttagtctctcacgtggctttgaaacaatatgaggagagaggaatagtgcaagccaagatggagtagctgctgagaaactgtatgccaatgggttcagtggggtagagaagcacccactcagtgtttttggttttgaaagaggcaaaacaaacaaacaaacaaacaaacaaacaaacaaaaaaacggagtgagggtcatccaaaccaaaaaaaaaaccacagaagaaaaagtccatctcattacactgctgtgatgaatgcagtcttcaggatgtcaccagcaaacaaacgactgttggcaggcatgagccaaaagagaagaccatgtggaaaagggaggagtagaacgatgacagcgaggagctagattttctgaggcagcgggcaattcaaaagcataagaaagtctgcaagatcatttctcaggaatgagactggccaactcgaatgaagcttgaggtaaatctggagctgctatccatcaggggaagtaagggggcataaagttctgctgtctgcattggacctaacggtggcttgataggatcacaggtttggttcttgttttgttttggtttttttttttttgaggcaagatttctctgagtatccctggctgttctggaactcaccctgtagaccaggctggcattggactcagtgatccacctgcccctgcctcctgagtgctgggattaaaggtgtgaggcaccgacgttggactcacagtttgatgcttaacgacatcaagcattatgatgggcagtgttcagggatggctgtacagaggctgaaggagtcattacacgcctgcccccttgcccatgttgactttgtgcttctgctaactgtgccacgccctgaatcctgtgactttgggaggtgttctatagcagcaggaagaggtgctggagcagaatccagggagactcccccagcagctgcgggtttcctgctaatgtgagccttggggagcacttcactatcaacatgactgacacagcggtgtggatggccttttacccagaaacctcactgagtgcttctaatgggtgcctgctgtacattgattagcattccatgggcccacatcttagagctcaggggttttgtgtcactcgaaagggatgccagtttggttcagatcaaccacaatttttccagcatcctcttaaggtttgcctgacacagaccatattgtcattctttgtatttccctctcctccactacttgaggtaactttctgcaatttcacaaaagatgatcccttaagtcagaatcaagcagaaggcccttgacttactcagtgtgaatctctaaccccacacccaccacaatctgtgtcacatagttcccatgctcggcacacactcttctaaatcactgctattctgacagatgaatgaaaaccttccttcctctaggacccagagtctagtgaagcttgcctgtataaacacggtgggatagatctcagctgtcacttattcctgccattggaaactgttttagtttgctgcctgataccatatcagaacacttgagtctggggaatttaaaagacagagaaacttacttctcagttctcaaagtcagtgagctcaatattaagatgttggcatctggctagggtctgtatcatcccatggtttgaaaggcaaataagtatgcttgcaagactgagtaaataagagaggttcagcctcacttctgtgataagcttatgctcacaaagatagcaccaaccttgctgatctaaccactgctatgacccttacctcctaatactgttgcgttatgatccaagttttctttaattgattatatatttaactatagtgtatgggcattttcctgcatatatgtgtgtgtagatatccgtatgtagtgcccacagatgccagaagggagtgttggctctgctggaacaggagttacaaatggttgtaagccaccttatgcctgctgggaatagggtcctctcggaagagcagacagtgagtgtccttaactgccaatacatctctacggccacagagactaagtttttaaaacaagaactttgcatgctgactttactgggagactgagttccactcacctcacttggttgaatcactcatagaaaactaagttctaggtggatcttggaataggcactaatatttttagatcctcttacagtcttcttcagggtgccaagtgtccaggtaactgtgtgactctgtgtaagaaatgaatcactacatatgagtgacataggtgtgtgcattcgcaaattttaaaaagtgaaaaggaagtcatttcttctatttggtggtggttgtagcaactaaagaagtctagatcgatgactattaactgctctcatcccccactgtcactaagggatgagtggcacagtctggggatgctaaaggagtctggtgagtagaggtcagaatgttactaaatcccaaatgcatagggtagctctcacaatgtaaacttatttgactcaagataccagtagtgccactactggtcatacacagtggtaatgaataactttaaaatttcagtggtttggcctgggaaatgattatttttccttgttagttagtaagaaatacccacggtaaatggtctatgaagacaaaggtttattttacctcataactttggacgttttagttcatggttatgtagatcccttgttttaatgcctctggtattgaggggagggaatacagcacgatggggaaagacggtatagctaattccttacctcacagctgcagtgtggaggaatgaaaggaaccagattcctaacaccctctccaacggaatgtcctgaatgacctaacttcttcccacaaacaccatctctaagggggttcaccacctcccaatagttgccatggaaaattcaagaattaccttcaataacatgggccttgagggacttttaagatccaaatgatggcattcttcttcctgctgtatgtccagcatgggtgcagcacatcctgctccccattctggagatttggagatgggatatgtgtttcctcatggtcttcttcagtgtgacagaggacgtgggatttggtggatcccaggctttaaagctccatcccagaattaacatgtaagttctgattacatttcactggccatggtccatcagtgaaggaggtgatgccttagacttgtgctcagacaaggggtagaataggaacagtcaaaatctgcctgcatgactggcattggggacactgtgagaacataaaggggctttctttctctgttacttattgccatagaaaactccatctaatgcttaggggctgaagataactgcaatcactctggtcatggagttgggtttggacagagctggctgggaactcatctctcaccacagggcatgagctgggacagctcaccttcagtgactcagaggcagctgccagaatcactcacccatgtttggccatggctgtggacttggacctctgttgtggctgtcagcttgaccacctccaggtggcctctgggtgtggctctttggcttccttccagagtggtggctgttctcgggcagtaaggaaatgctgccaatttcttaaaactcaagcctgcatgcatgcaggcactgaatcacgcttacctcaggctttcgatggaaatgttttatagatgccagcggtgaggagaaacaacagaggcctcatctttcaagggcagaagagccttggtttaaaattgcttctggggacaagctccttcagtgagaattcatgagccaagacatgaagacatcagagtcgaattcagctccgagttctagcaggttccaccacagaacttcttgttactagtgcttacttaaatattatgaaatgttttgattcagtaagtgtatgctgaatatattgttttgtgaatgtgaactgcaatctgatttaattacctaaaattaaaactgaataattctaatagactcattaattgactcattaatggactcattaaagcaattaaaaaccctattgataacttcttttctgtgaaataatgtatttcacaataataccctagtttactgccatttaaaatcaatagaaaaaaattcatagaataagctgggcctgaaagcctactcagaatgctgagttgggaagatctttttaattggcttgtccatttaaattgtgtgtgtatgcatgagtgtgtgtgtgtgtgtctctctctctctctctgtgtgtgtgtgtgtgtgtgtgtgtgtgtgtgtgtgtgtgtgtgtgtgtgtgtatgcacacctgtaccatgacatgcatgtggggatacgttttggaagcttctcttttccttccactgtgagtccctgagatcaaactcagatcagcccgtttactgaaacatctcagtggccccaagaagattttaagttcatggctagcctgggctacagactaagttcaaggccagccttggtaacttagtgagactatgactcaaaataaaaagtaagggcagaaccgagagtataactcggtggtatagcattgattcagtctgtggtaaaaataaaggaagaaaggaaacagagagaaaaaaaaaaacaaaaaacagaatgattcattcaggcttgaatccattttactttgaactttgtggttcaatttagacatcaaagtaggctggacgtgacctgaaagactatcaagaatcagatgccacaggacctgggcattagcgtgagtaagccttgcctggcctgactcttgagaggagaattgctctttgtctgcaagtattcctgccttccacacatcagtctgcttgagccaaagcagcaaggaaaagtagcctgttctagaggacataccctctggcttgggtggagacccaactttgcaatgcctagggtcaaggtcaaggcgaagggaccacccctagagaggcatgttcttaagccaagctaatgcagtaagaagaatacttttccatttgacaaaatactgtatgtctccttctcagaatccctcacacctagtgccgtctctgcaatggcaacagtcatgctgttgggtttgtccacctttctcagtcccaactcagacaggtgcaattcagttttcttttcttttctttccagtctcttccttttggagactgaccagaaatccaagtatgtcttacactttgggcttccttgctcattttttgaaggcccttcccagccatgtgatgaaactccacagaaacctgtaactccatctttctctcctaggcagcttctgagatttatagtgtgcctgctctggggattttcttagaaactctaataaaattgtcctcaagttttcatttgagtctgtttttaaatccattttattaatgaaattaagaacgccaaggcagggctccctgtatcaaatattaatcacattctgtggatgaaagggcccatattttggagagagtgtttttaaaggtcttgtcacttctgcttgcccatttagcagataggtaaacagaaatggggggtgggaatcacgagctagattcctaattatcaattaggaggaaggccagcctgttcaggttgaagagatgctgctgggctctggtaacccccagtcttcctgcctgtgtggactaagggaaagggggtctcagtttctgcggcaggggcttctcctatgacccagcatcgccctccccccctccaggccgtctcttctctttgtccccaggctgaaggactcatctgcctgcagattattcactgacagctgcctttcccttcgccctttgttctctcttttacatccaagggagagaagcttgggctcaaatgataacatttgaattcagctcatgaaaaattctatcacaagtgtgttggactgtttgatctttggcttctcccacacatttgccctttattctcagatcaccataagcttcattcatttcctcagagcagattgccatttcaggaggaaagaaatgcctgtagttttccaactgagttcagttctactccggacagggcagcactccagtcagggttgctacagaatcccattgaatcagatgtgaaggagccacctccctgctatgcagaattgagcctgggaaacgcccaacctggattaagatcccagccacaccctccataaccttcgttatctcggcagacacttagacctctgaaggttctgtttccttttattaaaagggcacaataattagtgaccctctccaaaaaggacaaaggttgtcccatcattcaacagttgtctgttgactttcccttgtgtgtagtttgccccagtgaggaaaatgaaccagacacagggtcacaaaagaaagtcaatttgcaaagcatggcaagtcacaaagaagggagttgaccaggtgtgataacatcgaataggtgaaagggttatataatttgttgtccagaacagcacattatttgaaatggaaatgggtattgtgaatggtgtgtttgtgtgtgtgtgtggggggggtaatagtaaatcaggatttcttgggcaaacaggagccagggttctcccaacccatcttcactgggagagggaaggtgggggagagaagatgggtctgagactgatgactactgggtgaaatggggattaggaccacagaccctgagaagaaacatctgaggaaccctctaaggcagacagaagaaaagcccagtttgacttggagacctgggggaggcatggtggctttttcggcacagacctcttcattggattgtcttgtaggcctaaagaaatgtggatgttgtctagctggcttaaagggggaaaatgcaagagcagatttgcatttaaaagaaccagtccccctgtttagtggataggactaacactgagcagtatatgtcagctttcgccctccaaggataattttaaaagaatgcccagagccctgtacccagtagtcctgattacttagctgtttgatggtggattggaaccagagtgccatagctgagatacacaccagaggaagcctcttgtggagaataatgcttgcaaggccatgaagtagctcagatacgaaatggtagagcaggggtctcagtctgtagtttctaagctggaacagacttttggatcccagggagtcttgttaaaacgggggtctctggataccaacttgctcttggtgggacccaacaatctgcatttctatgtttcctagaggtgctgatgtggcaggacacggaccatactgaaatttactgatctggagaatttgttggtagaccatctagaggcgcgggtgaaagatgacataaggcctcttacagttttctgaattttgcaagtgaatacacagattgaaccactcactgacatttaatagacagctcgtgggttagactacacagatcatgaattcagtgctggaagtataggggaggtgatgacatgtgagtctgagggtcaccaaagtcaaggatataataataggatcgattgcccagtcccttctctgactcttcctgacatcttcgaatctccatccctcttttcagtccttcacatcacactagggttaacttacttttgttaacttactttcccctattcctttaagttataccatcctcaggcctgattgtgtccagcctgggcaatcagatgttttgtcttttccaaaagcacaaatcagagttgagggttagtgtttgaatgactgttgcttagatgaccgttttctgctatgtctatggtcccgaagtaacctcattaggtatctagggcttatctcaaagcattaaagaatatgggatggctgggatatattaaagaatatagatgccagagctccacagagatggttgtcgggtgcccagtgggccaagcagggagatggtagtcgttaaaacagtggtgaaatctcaggaaacgggagaaactgtcgttggtgtttatttagacaccacagctgttcccgagtttctacctgtgctagcaacagcgccatctggtggaatgaagtgattaaaaactaaactcaggaatgtttaaacagtgctctgggaggtgttttttgtttttaccttaaaatttaagcataattctttattctctgtagaaaagatagaccctttgggggagagttggagattacatttgttgaaaagaatgctcagtgtttgaacagagaaacagccaagtcactgtaattaagtaggttttatggaaaggacaggtgtcctccataaggaagctgggatctcctcccatcaccagccctatagaaaaacaagagcaggtgtagggctgggattctcagacactgctttgtgtttggagctggctgcccggtcactcaaacggtttctctctagctgtatgacttcccgccccgccatggcagggactcctcagtcacttcctctgttgctcctctattctaggcctttcctcctgcccagctgtggctctgccaaggtagcaacagcctggcagaggccacagttgaaggagggacgaacatgagtgtgtgcactctccatttctctgttttgtatttctgttgttggggaggaggggcaagctgtcttctggtgctttgcactggagtctttcctgattttgacatcatcggcaggagcaacataccttatgggagtataaccgactctccatgctgaggatggaggcacagtgttgcgagggaagatctgaagaaattgtcaaatttcaaaaaagaaggctttttgaccttttagacaagccaatgaatttgggaggaaatggcaaggcagaaggagtagtggtggacccagcaaacgcttggtgaaagagatggtggatgaggcttggcttaatgacttgactatagtacagctctcctgttgcattcgtgctttctttggcagtcaggggtgatttctcatgctggcacagtcaaagcaacttcctcaatgacattctgcttggctttctgctatggaaagggcagtccgatagcaccttcccggcttgctgcttgtcaagtgcctttggaagaaataatcaatatgagccggcatggcctttactcttcacaaacaaactgggctagaaaacggctcggtttttgttttgtttgttcgtttttgttgttttaactttgatagaaaatgtaagccacgactggtctccacagttcatatgactgattttaaagtggtctcgaggctatttctgtcggcggcatcttcccctcctatcctcaacttaccttccatctcatttttatgactgattttcacctggaaggtttgcacattttagaacagttaagggttttcctacaatgttgggaggggaggaccagattcccagttccctcttctcccctctcccagggcctgtggccctccatctaagacagttggactgggcacacagctagagacaacattagtgcacaggatagggtagagagaacaatggccttgcacggtttctaagaacaatgaatgctccaggcttgaagggcccatttattcctgcttgatgagattgcctcatacaaggaagtgtacagccccacacaaggctttagaaatcctgtctcccaagtaaacaagcctcaagagggcttctgaagcaacatgtctgtctcactgatttttcccctcatctgggctcttgcttcattttttcctccctctacaagatcacctgcaggaaccagaaaaatcctcctctccgaagcagatcatagaactgacaacttttccaaagcaaggcaggcaggaagctaaacatattgccctctcctgccttggagctagctggccataaacaaattctctgacgttccctgtatgatagaggatcataaaatgccatttcagatgaggtcatagcccacacctgggaggaggaaaatgctgtgtagagggaccaagaagaagctgtacagacgggcccttctggcttttcccacctgttctgtcaccattgtatttcctttccatccagtcatacttcaacacgacactcaaagataaaaatggacagtttgtgctgggtcaatgctccattaatcctaaggttcctgtgtcacctgagactatgatcaagtcaatttgtcacattcttctcttgttatctgccttttagtgtggaagtgttgctcacagttctttttaagaggcaggaatgagctctttccccttcccacccaccctgtgctcagaaaagggaaatgggaaatatttcatgaataggagtaaaggtcatttccacaggctgagtccttcagtgggggggtgcagaggaaagcaggcaaggcacggggcataaatctccactggggatgtacacactgttctttctggagtgcaaggtgtgtttagtgtagtcgccctgaacatcttaaagtagttaagggctgtgtgtcagtgaacttcctttgtggaatgctagaggtttttagtctgctctgaagaaaataaataatgaaagaaactcattgtatctcactgaggaaagcccaagttttctttcttttttttccctctttttttttaaaaaaatctaaactagaaacaagcttgttttacatgtcaatcccagttccctctccctcctcttttcccctgcccccccaacccccccatcccatcccctttctgctccccagggagggtgaggccttccatgggggaaatcttcaaaatctgtcatttggagcagggcctaggcccacccctgtgtgtctagattgagagagaaaccctctatgtggagtgggctcccaaagtccattcctgtgctagtgataaatattgatccactaccagaggcccatagattgcccagacctccaaactgacatccatattcagggagtctggaacagtcctatgctggtttcccagctatcagtctggggtccatgagcttccccttgttcaggtcagctgtttctgtgggtcttgaccccttgctcatcactcctccctctctgcaactagattcctgagttcagctcagtatttagatgcggttgtctaaagaaagcacaagttttctgaaaaggtgtgtgagatgcttaagttccttcatcttggggcaatgcagaaggtactttggccaccagaaatgcctgtaaacatttgtggatttaaatttcagaaaaggaaaatggctgtttccgactctgctgctaacaccagagatctgggaaaacagttgtaaatccccagtgggccatgtttcccagaggagggggatatggacctcggagtaacacagtgtctccccccaccctcattttctaatgcctcatttttagagatgtgtatgttccttggaaagacatctaaagccccagccaaaggagatttctcctctcactgtgctgttgataccaggcaggaagaataccatcggcaatcgggtcagcaggacacagagagtatgtttttcatattagtacacattggcttcagttcactagctgtgtgcagtcaccctgttctgtgacagatggaagtttctggaaaaggattggccacctccaggcacctgccgcctaccctttattggatcaaggctggaaatggtagtagctgtttgtagcagttggtgtaaggtggtcctggcttccctcaagttggctccaggactcaacagtaccttccaagcttctgaaaataaagaagagttggtgcttttattctcaggggcctatgaaaatagtagtgctccctccccaagtcccttgtccatatgtgagaggagcaccctgcttttggtgtccttggaagctgtgtatgtgtttctgtttggctctccagtggcgcataataataacatcattggtaataaaattcagatgtcactgaagaccctctgctctctgcctgctttgagatttctttaccttctgggtagtttgtcagggcaggctattggctcctgactgggggaactaccttacttagctttccacctcccagacagtctcccttctgtcctcccatggtgagccaaacaccatactcattcccactcctttgacttgtacaaaaaaatgctaactgagcatttgtatgtcaacaattttgaatgtacgtttgagaacacaggtggggtttgatgtcttaacagagtaagagacatggctggaggggagatagaaaaagacaggatgagaacagcctccccattctcccctgcattgatttaacgtttccttctggctccccctattcgtttagcaaatttacagaaaacagcaacaaaccctgtccccagtgcctgttctgaggtaccatcacatcccccaaagatgccctgtgaaggaaagaggcctgtggatttcctctctgggagatgtacattatattcagttaaataattcttattcttatcaaagagcccaaatttctctactcctaaagtaacggtgttgcagggcattgtggaaagcagattctttcccatgatgtttcttttgtccccagaggttgaccatcctgcccagtggggagagccttgttaatcaagtcataacctttccaaattgaaagactttcgtccacaagggtcctaacctctggcttcttgccagaaagagaccaaatgaatttgcaatcttgtttttgttgttgttgctgctgccagtgctgaagcaatgtaagcctgggtttcacacatgctggtccaactcctccttccaccatctttagcagcaagccatgttagagtctgccagaggaagatgaagtttgggaggattcatcttgtgaaaacagtttttcctatgctttttctcatgtggacatggactttggaccagttctgtccagtacacttgtgggttccaaactgcctgatctctctttagttacctgctaacaacagtctcttgtcttgaagttgctggctactgggagaggcagatgtctgagtcataagtggaagagactgcatttcccaagacattattagcaagtaaatttggctaacattttctatgcgataatgaaaaagagagatggggacaaaactcttctttcagatttctcactcaagggctgggcagtgggtgagcagacctcaggtacaaaattcctaggttgattgttctatggaaagggtggtagaaattgtagaaagtggtagaaggccaaggtgaagatcagtgccacatcagacactgcacagaggaaggtcccttcaggactccttgactcaaccagcagcataggtctaagacctgaatacccgctttcccccaaaaccaaggtctgttcctctggtggaaggtaagctggagcaaaccaccacaaaggccatgtcagggttgctatccacaactgcagtttctctagttcttcagtatctcccagtcagtgaagatttggagatagaatatactagagggttaaagagaaggagagaaggtgtttgtcttcctggtcaatactggaaatgattcctgctccttcagtagcttaagtcagctatgtgggattactcaatatagcacttaatacacagtgggaatcggcaaatgctacaagccaggaccttttagttgtttattcctccagggatgggtttaccggcacaccacaccaagctgtagactgtggggagtggtagaagcctgaggatatatcttatctacaggcttccaataaccaaaggggactgagacatgagactgaaacattatgcaattccactcctcataaagaaaagggatgtgagcatagctgtcagtgttggcaaaacgaaatcccattctcaactctaagccaaatgacttgccacccactgtgtggttggattgtgtcctcctcaaaagaaatgtggaagtcctgactacgtgttcctaagaatatgaccttatatgggagtgcaattttaaagaagtaataaagacaaaatgaagtcatttggctagagttcaacacaactagtgtccttataaaagtagaaacttgggtgtagagacagagaaacaaacatgcataatgagaagaaagcatgaagatatgtgggaagaacatatgatgtcatggaatgccaaaggtttccagccaccatgagagacaaggaaagacaaagaaagatttttcttagagatatcagagagccctgccaatttttggaaaggctggcatctagcacgtctgttgctttaaatcattgtatgatacttgttatagcacagtatgaaactaatacagcttcagaaatctaattataatattaaattctgtttactggtcatttataatgtgcatggtatgtgccaaacactactaatgttttcagacttgatcctctaagaagtctttccaagaagatattgggaaagatggacctcagacatctcagaatcagcatggatgagctgctggtagatttctccaggcagacctcaaaaagctgggctcttgcaggagacaggtcattttattgtacccatcagttgctcaattcccttccaaactggaaatgtaacttttggactgagaggccctactgttgacagtgatgatcacgagtaaccaaaccaactggataacctaacaatgtacgattgattcaaggtgttttaactgttatgcacggagagggatttagggagggaactggctagagagccagctggttgctccagctatctcaggataaatacttgcagctaaatcctttagcgagaataaaatgtcagtgatacaaaacagaatctcactgagaaaggaaagcattctaaattgccaatcagaaggtttgttaaatgggatctaggctgttaggggagaccaatggagatggtacaccatggataagccaacaattatcatgatgtttgaggatagagatctgaagatttcacaggccaactcaaatagggacacctgcattgagtttcatagcacactgtctttaatcttgtaactatcttgcctttcagctacaaagtccagaattaaagtttaagattaaacttgtaagattcagaccaatgttaacctggtgattagaacaccttacataaaatgataattttagtggctctcagaagatgattgcaacagttagagagagttctgactcacaagatagcatgtctctgtggtgccatggttctcaaatctcaggcttcccttttcaaatgtcaagatttcagtccttcttagactggaaaaaggctgtatgtaggtgattgctgtgttttcctgggtcagcctctgtggctcatgcatagatttcatttgcaatataagtaaaggatcaagtggattctatatgtcaggtttcatgccaactgctgggaacataaaaatgaaaatgtacatctttccatcagtaaaagttaccaaaagtcttgtcgagaggatgatgtttaagcaaccattataatccgatgtatgaagtgttatggggaatacaacagaatttttcaggagggtggagaaggagagaccaacttcctaatgacaagagctggggtgtaggaaagctacacagagcaggtgtgattgcaggatggatattggcgtatgccaaataacaaaggttctcatgaaccaggcttcaagaagccaattaggtcctttacgtgggggaggtgacatgattatatttaaaaaagctctgtggccacaatgtggaggatgaagttgcacaaagcacactctggttcaccttactctaaatgacaattttatctgtaattacacatgttgtttgttgctacaccaatcaataaaaagcacatgtaggtatttctagctttttccctgttcagcacacttttggtgttatagtcaattagtattgtttatagaagcgtgatggtgagtaataaactacattcaaatagtggcacttaagatatatcgaagatcacgctcttttcaattaagttttctgctccccattgtgtctttggctttataaagtttataatctattatacatttttagtaagagatctctttgaccagatttgtgtagtgtttaggattctgctcttgtggtactgaagacttggacgcaaggcttcacacatgttaggcaagtgctctatcactgggctacatctttaggccttcctgttgaggattcgatttccaaagttaaaaacaagtctttaaaaaaaatgttcccccacaaaccccattgttcccacatgacttctgaagttctttacctagatattgagattcttaaaatttagtattctgaagtaggtaaggacaggccccctcaaaggatgtcatgtccctttggtacagcagtcacttgcattcagcatcccttgagggactgaagctaaaaagggccattagggaagactatccctacttgtagtaggcattaaagaaatggggggaggggagtgagtgagagagggggagacagagagagagacagagacagagacagagagatcattcctacaccgaggcccattactaaagtctgtgactggggtaacttgaacctgagtaaacaaactccgaagtgatgctgaccttctactggcttctacctgccccatatgtctcttggcaacggtttagacttcactaaagtctatgtgtccattggtcctgccaatccttccatgtttcaccattcattgttgaaataggataaaagtatcaggctttggatgttggagttactgtcgtgtgtagagctccccctggtacttctaaagctaataaaacatgtgccttttcactttttaattaggtcttgtactgagtttcagccaaaaatcccacataaaaattacaggtgggtgttggtgagatggctcagcagatagagatgctcagcatgaaagcctggagaccggactttgttccttgtaagctacataaagagtagagaatcaacgccacaaagttgtactctgaccttcacaagtgtgaggtagtacacgtgcatacatacatcatgcacacatgcaattaatagataaattattaagaattggaagtgagagtggaagattgggggattctacattccctatatagaagcatagatctttaataatggatactgtggtgtacatatgtactgtctcgaagtatggttttcaaacaacttgagcatgtcccagcattccttgcagagctgttaagaattccagggcccaatcccatcatgtctcattcaactggtttagaatctgggttgggggcagatatctgaggaatggggctttggagaagttcctaggtcctgctcagactgctatcccaaaactactcactgaataactgctctaacatcttaacagctggcttttgttgggcactttgtactttccattctggatgccttattcagatgccagttcattgaattggcgtgtcagtcattggatactggtattattcaaatgaagaaattgagttttgagaaaaagaggcagcattttcatagtcactcagccaacaagttgtgggcactgattggacttagaacttcacacacacgagttgccatggttttcctgtggtttaatttctacttcccagatgagcataaagtccagatgtggactttggaccagatgtggactttggacctgtgagagcagtttggtggtgtatttagtgactaattcacctttcttggagactgatggtgtgcttggtgaaacagtcctattttgggattgtttactacatttccaatgaatatttctgactatatagaaattgccaaacctggtgattcatcacaaaacaaaagtgcatccactcgttagtctatggcttttagtttagggatgtggtgggagaaaggacagattgccacccactgtgggccatcttatttttatttttttcccagtgccatttccagtacggggtatggaggtggttttcagggctctgtggtagttactttttcaatagtccagatggttctgataaagagttaagggatcccaggaagcgagactatgatcctgactcaggggaaatcggtcaagtaaatcactttgttttgagagctttggtctctgagcatcaaaaatgatcacacattttattggcttattaacgcattactggagtcactgagggacctcttgctacttcatggctgatcatactccaaggctattttattgcttatttttctggctttctgcctgttcccaaccctatagccataactgtgcatgtgtaattaatgaaatgtaaagttcaacaaagtaactcctttctcttgtgcaaacacacacacacacacacacacacacacacacacacacacacacacacacagagagacagagagacagagagacagagagacagagagacagagagacagagaaatttcatgactacattaggcaagaaagattcctatggtcaagagctaaatataaaacatcccctctagggacaagatagggaatgagtttgaatatgataaaagtacattatatacaactgtggaaatgccttaatggagtccattggtttgcacaatgaatatatactaatatattcatatatactaatatatatactaattaataattaatatataccaataagaacattcttttaaaaagtgccctctaaccatggccatgtcccattttagttttaggactataagtgcccttcatgtaataggagaatgctatcattatttgatactaaagtttcttgtggctaaatctcattctcaaagagaaaacatggataagtaatggacttttaacttccttgtttattattacatttgaaatacatgtgacttttgccaataagcgttcctaataatcttgaacagaaatgcagagaggaattgcacatcagaataaacagtaactatgaaagtagctttaaactgagaagaactgcaagaaggctgtggcctccacattcctgaaacagggttcctaggtcttaacaatagtcataattgtgctctcctgtttctaaatcattacatttttttactatttagttacgtttggggtattttgcctacatacatgtctgtgtagcacatgtgtgcagtgcccacggaagccagaagagggtgtcaggttccctggaattggagttacggaaaattgtaagccaccatgtgggtactgggaaccgacctcaggttctccaggggagcaatacatgctcttaattgctgggccattatttctccagccactaaatatgtagttctttatgaaacactgtcttttcagcacagtctgttcacatttccaccacccaggagagtttgtcacaaccagtaatgttttgtggcctgtgttgcagttattgacatcagtacgccataaacttcacccagcgttcatgcttattgctgtttctttctacaaagtccacgaagaggtacttctttgttttatttactggcacattgttgatgtttccaacagtgcctaacacatagtaagcaccatataacactaaccaaatgaatagataacactggatcaaaaaacatgcaaaacatgtcagttttcatcaccatcggaactcaaaagcagttgaaagaagtgaaatacagtgcatagcagtgagcaggaccgacgatgcctgccttctgtatttctaatgttggctatttcatgaaggaaatggaacaaggactgacacaagctttgtccaacagccgcaatgataatctaggtatcagcagtgtagaaaataggcaatatagattacaggggagtatttgtaaaagtttagatcattttaaagatctccttcatttaatctattgcttctataatattctcttccttttaaagtcaaatgatgtggatggaaagaatacaaatgaacttccagagtaaatactttctgggcaattaggacaacaaaacaaaaatatctttaacatatggcaagagaagtgcagcttgccaccatatgaaaaaaaaaaaaaaatccaagcagctgagtggtgaatggctgtatagcaaatgacctcattagcagctccaaacaattatttgcacctcatgctttctgtgggtcagggagccagggctaggccaactgaatggttctgcatcaaggtgctagtaccaatttactgcagctgtcataaacagtactgcaaacccggagctctgaaaaccaggagctctcaatggcttccctctgaggcctctctccttctcattgatgctgatgctgcctccttgctgtgctcatgtgtcctggtgtttcttttgagtgctgagttcctcttgtcataaactatgagccagcttaaatttaagtccacccaagggcctcattttaccttatcagtccttagaaggccttatcttaaaatgcagttacatgaatcaggatttaacctcatttacctttgtggagaacctcattctaaagtaggttcaacacatgcctttggagaatgggaacagaattcagctttatttttttttgggggggggtggtgtttctagacagggtttctctgtggctttggaggctgtcctggaactagctcttgtagaccaggctggtctccaactcacagagatccacctgcctctgcctcccgagtgctggagttaaaaggcatgcgccaccaccgccaggcaggatgtgagggcaatctggcttcaacatctgtcaccccattgactgtcagagttgattgggctcatctggctgtcaaggcgggtgtcccctggtcaggagccagccctggttagatataaaagtcctctttacaagaggcttggcgacctccatgctaaacccccaattagtcaagcaccccaccccttaggttagtgttcgagataaccacaggagattaacacccattcctcccctacttcctttctctacttcctcctttctctttaaaaactccttgtttgcgtttaataaagtagaccttgacaaggaaaaaactgcttggtcttgattttctttcccacccatttattttcaggcttagtccacctcggacccacgaattcccggagccccgcaggctggggcatccccttcctcccttaccgctccatgtgcatcccccctcccgaagctgtgtgctcaatcgaagacaatgactttccccgaatagaggaggaccagtcttcggtcaagggtatatgagtagctgcgctcccctgctagaacctccaaacaagctctcaaggtccagaattcagcttttattaagggtccccagtaaggttggggctgtggccgcatttgatggatgggttggggaaggcccagcttcttaactcacacatgattggcaggcctctgtcttttggctgatggtttcaaactttagttcttgtcttgtggcttttcaacaggctttctgaattacttcataaagcagctcccatttctcttagataaggtgatctgaggctggtgactatggagaaagaagaagacagagaaaattcaagatacaaatcacaggctttttgtaatccagccctgaagtaacacacctttgctgttatcatacggcataggccacagagaccaacctagagacacggtggggagagggctgtataagggaatgagaaccaggaagtaattatcatcggtggtcagctttaaggctggccatgataattggattaaaattaaaattttagactgcaaaaatttacatattgattaatcagtaaaatatgactgaaatatttttaaccactgtaatggctaatggggcaagaatgatgttttctggaattgaattgcattaattgaagaagaatttgaaatattttgtcaaacaaatgaatatgtgctgcaagttttaggtcctaagggccaattcctctaaataaataaaacgcactgggagttagcatcacagtcgactctggtttgaatatgtattttagcatttagctattccgacaactttagcaattcattcaatctctactccctggtattctcatgcaaatggtagaaacacatgacatctgcttcatgtggttgctgtgaagcatgagctaatacgtagaaaatgcttacttggcacagggcccagcacaaatagcaaaccgaaagtttagtgatagtttcttattattactgctgaatagacttccgtacatgcctgatccattacaggtactcacaaagggctctggtgactgaaatatattgtccctgtggagttacagcagagtatgccctggaaggtgatattagctgggagcattgcaggctgttgctcatttgaacttaaaagaactgttgagttctttgttgaaagttctggaggcgtttgtgctaaaacatgtctaagccagaggaggtgggacatgtctgtagaactcaaaagactgaggcaggaggattgctgcaagtttggggcgagtctggtctataaagcaagttccgtgttatgtagaaagccctgtctcaaaaaacaaacaaacaaaaaagcaaagccatcatcatcaagcctaagtctataaattgtatcattgtatcacaatctttattccctaaaataagtgaaagacctctttttctctccacaaaagagtttgacagaccatgctctctctttctctctctctctctctctctctctctctctctctctctctctctctctcacacacacacacacacagaggacagttaagtacggggcttagcttggtgccaggtaataaagtaattttgacatcaggctacatggcttgaatctctgtggctaacagaactttcaggcagcaaaatgattcctagggaagattaatctagaacaactgtgagaagcaaacagagagggaggcatcccagttgttttgcttcaggatttaaatagtaccttccacggctcctcataaagcacaaagaaaaagatatggcttcttaagagagaaaacaatagaaaagtttcatttttcaatgtcttggatttcacggacgtgagcctagtcacggttctatcaatcaattaccatgcccagggtctggagtcactgcttagactcagtcacactgctgtctgaacttcatccaactgaacgtcagttcaacttcagtcaagacttcttcaagtttcaagtttggggttcagcaagagaataaagtgggctctttggaggaaagacatttattaggagagttattaatggcacagatagagagacagacaaacagtagcatggtgggtgctctgaggagagttaaggcatataagacagagcagacgctatttctaatatgtttcagaggaaaggggaggggtgttatgtgatgtgattgatgaacttagtaagttcttcctgagtcacctgtgagggtgaggaaggcaaggatggagacaaacaacctgctaagttctggaaagaaaattacagtagtttaaagatgtcaaatttcaacccaaatgaaggagctttacaaaatggtataccactggctaacagactttctgtcttgactggaagaaaggaaccattttcctcctatttaggaaggtgacttgaatgcttattgagccacatggtttagctcccaaattattgtgttttagataaaaatggaaacaactcagatataagctagaagtgtaatttagtgacaaaacacttgcttagcatgcaagaggctcagggtttgaccccagggctggaaaaaaaaaatgggaagaaataaaaagcaactatttctctcacttcacaagaaggacaatcattatttaaatggagttttatcaatgaatctactttcctcagcagtgttaacctcaagtaaaaagaaaaccaccagcaagagcaaaaacctgaaattaagaataattttccttgtctactgtctccccactctccttaaaaacatacctcataaattggaatgctaatcagggcttcttagaaagcaatgggggtgaagaaagagactacagatagccagaccccagttttcaatcagtaaggagagaaaatggggggagcctctacacggcagtgatgtcatttcatgcattcttttgaaactgaaagaaagccttgctgttcttgaacatgtgactactttcactttgctgctattgtacatattttgtcagttgcctgcaatacttttctttttccaggaaaaagtcctccattgcccaatgaccccttgtttgtcgtcttaattcctcaggaaacctctagcagcagccgcttcccccttcttagtttgctccggtccacaattttgctttatagttattaaattctaacttattttttgctacgtgtctgctgccattagtactcagtgaactatttgaagctagcaataaattttacaaatctagcacttagtaaaacctccaaatactcttattgacaagtcaatgggtgaataagagaaaacaagtttctactttgcttttcacttggaaactctcaatgttacatctgttgggaatgttaaacatgggtttgaaaattctagcacagaattagaagactgtttcagttaatcttcttgagagaaacagaaccaataagtagaatacatgcatttatcacatagccatgtgtaagaaactgtgttcgtgtgattgttgagttgaacgagctcccagacctgtagccagtaggcttgaagaccaggttggccgatggtgtggttcctgtttaaaaggcagggcccatgctgtagttcaagtctgcatgcagggaaaatccaaagtcctaccttgaacactatcaggcagaaggcagtctccctttctcaagcctttttgttctgttcaggctttcaacagattgtatgaggccacccacatcaatgagaacaatctgcttactttgtctgctgactcaaatgttaaactcttccaaacaccctcatagacacacccgaaataatatttgagcaaaagtctgggcaccccgtcatggccatatgtgatggttaatctcaactgtcaactcaataaccacctggacgatgggcttctgggtgtccccgtgggaatgatcttgattagcttaaccaagattggaggactattccactgtgggtagcaccattccctgggctgggacactatatgaaaagcaggaagcaagttaagtgtaagcattcattattatcagtgccctgttcgaggtggatgcaatgcgaccaactgctatgattttcccactataatgaactgtcgcctcagatgttgagcccaaataaacttttccttctttcagttgcttttgtcaaagtagttgtcatatccatgactaagtaaatagtgactaagacattcaccctctttgctcagggattggtctctggaaagacacaccacccagtttgggctaatattactaatgatgacatctacttggagcttctataaagtatctttcttactgaaaaatgagagaccagataagtctttcctccccatccctctcttcccctatcttgtcttaggaggatgaggtatttgaaatagctgtggtcacattttgacctgactttgactgtatagacttgtcacaactggcaaagaaaaggaaatggaagcaatagctgaagagacaagtctgcaaacacatcgcaagtgaaactaggcacacagttcaggatcctgaggcacagatctcactgggctctttttgccctcttgcatctgccacttatggcactaatatggattggggcaggatgctgtgtggccaggcgtcctttctctatctcttttttacatggcaatcttgcttttctgttgttcaggccttgagaaacccataaggtccagtattttgactgttgtttggctacaccctgccttgccattgaaatcactgtcttatttatgtagcatatactttactttctcaaattacccaagttgaatgctctgtctggcagattcatgcaaaaattcatttataaaaagttatcactgagaaaatattttaaactagtaaacttggatagaggttggcaaagactttgatagcagccagatggtagacattttggttttgtggatcagacaattgctattacccttattcaactttgctttgttagtgaaaaagcagccacaaacaatgagattgaatgagtgtgactatgtcccaataaaacttcatttacagaactatgcagtggcttttctttcaaagtccagggactatagtttactgacccttgaagcagggtaagaagtttttcctggcatctgtgaaaatggctctaagtcattttgcctccttaaggacattgtctggagacatgtttgtcacactggaagaaggcatgtagtgggtagatgctaaacagcctataatgcacaaaacagtctccaacgacgagttatttctccagactctcagtagtggtggaggttaggaaggctgatctgaaatctgctatggatggcatcaatttctttacctattatggtgggttggagaaaagattcactaaattaatttttacaattaagtactcttaaatgctgtgctttttcttattgtaattttaaattgtcttatgataactcttacaaaagtgagataagctgagtttattaagacatgtactgtttcccccagtaatttcttttttattcttgaagtcatagatcttatcaacccaccttctttctgcctcctaaacatgttttgggtagttgatgtctctttttgtaaagtcatggtatggctagcttgctaaggctgcatcatcttggatttccttgattttccatttaagaagaagaaaaatctgatgaaaagacctggacctagctcaatgaggtgaattcatagtatgaatttgatttatatgtgtgtgtgtgtgtgtgtgtgtgtgtgtgtgtgtgtgtgtagtgtagtgtactgagggagcgaggctgagcagctgagcttgaaaaaagaaagagcttgaaagaatatgattatggtggggtagtgtggataaagtcaattaatagatgtctcagaaattggaagacaatgaaagagggaagactaacaattggcgtcatacacggtgacacacaatataattccagtacataggagactgagacaggaggatcatgagttcaagaccgggctgggatacattgcaaaactttttatttaacatagaaaacccctcaaaaccaaaatgatagttaatattgtgtgatttttcctgggcataagtgaataaacatctattgacttcagagacagtactgatggtagaccaagtgatgatctctctcaagtctagcttggtgaaccagtgagtttaactgaggttgaggaagcatgaaggaaggattggttcaggagtggggatattttatagttagctacaccactgcagaagaatgaagagttacgtatcatcaaggagatcaaaagatgcacgctctggcccatgagttctccttcagttccataaggaaaggacagcaggcccagtcttgtgaaggtctggtgtgggtaatttcaaaatgacactgcccatctcataccctcaggacaatcttctcaactgatccaccccttcttctgttctaacattctttctgctcccctttctacaatatactctgagacttggagtgatgcagctgtgtggttattttctcccatgtagagctaagcactcagctattgtactacagcaatactcatttcttatcagcactttagattaccagtctttgaagtaacatactcctgctacaaaaagcagtttttgtagtaataatctatggcataagcataaatgtttagaaggcaatttgagaggcaaattgtatccacttaactatagaaatggtttccccaatagagcttgcaatctccttagccacagattttttttatagtaccaaacataggtcacctctgtggaataggtcttaaatctaattggaatgtagttggtcatacccataaaagttgtgccaccgttaggccagtcatacaactactgcacattctgcctttagtttaggtactatatcatatagggaccatagtgcagcaggactgttggcaataatctcccctacacatacagtagcctatatggtgccattcatcactatgaaaactagtcagcagtcacagagctttccagcttggtctcagcttgatttcttcaagtatgatagacaaaacgtaagtgtattcagcaatagacccttctcttactgtattcttctggcatacaatcaatattagtagtattttggggggaggaggattcagaggaaaccctggtcaacaactcatggggtggtatctcacttttagtatcagaattttcttctaaaattctttgatttttgagtatgacttttcccacctaacaaagtacctttgttaaaactctaaccattgttttagcattttcaggcataagctattgtatgatttttccccaccttattggatatcatttatgcttcgtctggatatcattttgcaccctatgtgagctgatttcccatccttactattgaggtatgcccctacaaaccttccaaacacttttctaccttccaaacacttttctaaatctctaaattgggcattatataatgaaatcttttttacatcagccaaggatttacttactaaacaaatgtattatgaggatccactacaacatgacaaagttgtagcactcgcaacaattgttggctatagcagtgcctgaatgggagatattgtgatattatttttctttggtggtggtgaccacggttgtcatggggatccatgtgatctaaggtagatttgaacttgtcaagcatcaaagaaaaactttaaagccatgatgctcttgcctctgcttcccagatgttgggattacagatgtctcaaactacatccagttgggagacactatgttatttagctttctgtacctatagtcattccccatgaactgctctgctactttatcctaggtccttggcgcagcacacagcacatctcatcccctagggtctcagtagtgaggctggcttatgttacactcattactaacacactgttttctagctgctcacctgactttggtttcttgaatcccacaggctctgggttgacactgtgggtggccactgactttccatcagccacatttggctgtggaaaagacactggactgggtaaaaaaaatctctataaccagttgagaaatgtatacactgttctcttggagaataattgcctgtttctgggatgaatttatcattttcagctttgctgctatgccattttacttctttcttcggtcctctggtaaacttgtttgctcttcagctgtctacaggctcatgaacagtgaatttggctttctgccattttttttctctaggaactttgcctccacatcaataatgtcatacttgctttcaaatgacctgaatggcctcttttgtctgattttatttttttctcatatcctcctgattgcttaagcactttataaacccaatttacataacagtataaatcattatgatttgccaaggcctctcttctctcatacagattatgtcccaccatgaccctcaggagaaccactccattctattcccaaagatcccgctgaacaaagttctttttcaactgttctgtaaacacaatcttatctggacacgatggactgcatacccaggttcctcagtaatgtgtgtccttcctctaatgtcgtctagctcctaatatttattggaacttcaaccagtgacaaccaagtgttcctaatggctcagaggaaccattccacaagaaactgattgaccctgcattgcctctgatcgtgtagtcattatctcaaggagagatgagcttttatatttctcagtttctgtccacttctgcaacattcatactgtcctatcaactttcatgtcccacatcctcataagaaagactgagaatttttgtttcctctttttgaaaaaaaaaaaaaatctttcccaattgaagcagttcagaggcaaaacatcccctgatcatcattgtttcctatcttgggatattattgaagctcttgtcttaatgctgaattgcatattttccttctgtgttaaagatgggcctaaaaccccctgaacgtgggtgtctgttaggaggcttggacagtctatggggcctctggcagtggaaccagtatttacccctagtgcacgaatgggctttcggagcccattcactatggagggatactctcttagcctagatgcacttgagagggcctaggtcctgccccaaatgatgtgtcagactttgatgatctctcatgggagacttcaccctccctggggagtggatgggatgtggaatggggagttggtggggggcataggaggatgagagggagagggaactgagattggtgtataaaataagattgcttttaatttaaataaaatttatttaaaaaagagaaaaatatttttgcaccagaaaaaatagaaagaaaagagaaaagatgggcctgaaggtatcttctatcaattctaccttattctttctctttctcccttcgttgtccagttctttccatgaaatccaagttttcaaacacagaatggattatttcatacagctgtaatgtgtatcctctttcctttacaaattacacagctacaaggataagacaacatctccaactcattctcctgaccctacttttcctataaactcaaggacagtgaagaagatagcatctgtatgtctttttttttgcttaaatttttctcttagatgggtgagttctttctggggaagtagctgggcttcatttcttcatttgtatgccttacaactcacagaaaaggccacaaaacaaatgctatagctggcttatgaccccatcccataatgctgctttcatgaattaagccagatcttttgtgttagatcctggtcattaaggaagcatgctacatttttgttttttgttttaatttctattttaatttaaaaatctattttttttattttacataccaaccccagttctccctccctccacttctggtccccacctcccctccttcccactcctcatctactcctcaaaggggataaggcaggaagcatgctactttatatacatgtaggaagatagccactctaggatccaccccaccacataaacattctacctccaaaagaagtatagccttatgccatgtcttataagcaatagtaggaacattgcagtcgatattacaacaagaagaaatgcaaatccatacaacttggggatagttggccacatcaagattgttcccagggatgctctatcctcagccatcacaaatttggttttatgtcttgtcactcacagcagagagaatgcaagtgttcttccaaaatctgttggatccttgtttatatgccaactgtgatgagacttttcctggggaaacatgaacaaatgctatttcatctcagatagggcaccactgataggtcaaaaaagcagcagctgcaaatataacttggtgaatctatgagtttcgtttgagttacttacaaaagcatggccagtttatggcagcaacatcactaagatgtctcttcacaatgggaggggcttcctaaccccagcattgttaaccacatacatatcctccaagcatggaggagccttgtgctctttatgtgccacctcataagccttctgccttctccaagggaatgttaatggacatgatcctgtgagggtcttgggataatcacagctaccctgatttctatatagccatggataccttgtgcctggaggacagagttccactgcaggtggaaaatgaatgtttggaaaagacaggttagaaaatgttcctctgaaattcagctcatcctgaatacattattctagagcactcgtttcagaagaggaattgaagaaaagacattgcaaccccaaggtgggttatgagttttaatgagcctatatattaccttaaaactatcacatcagagcaaaattagaacattgatattccttggacttaactgatatttcctttagcaaatgctcttgtttagtaactgggctgtagaactcccctttccaattgttccccacctgttagttaatagacaagtctaagtgcaaagacacagagatttgcatctggataacatcatagctttgatccactgaacacagccagcagtggttgtcaagagatttttgcttctggaaatcactttattgtaattgaaactactatgttggagaattgttcatatggccattgcactatgccaataaagccaccatgaatcaaaggatggagtcagtgattggttggccaggattagccatagagttttggaggattgaggagggacaggaagaaaaaaggaaattttgaggaagggatggagtttcaagggctggtggagagaggatcagtcaatcaactctctgttggtccttggatttttatcaggtctttatctcaatttctaattcccgagtttttattatactagaataatttaggtaaatgttagacctgacctccaaagtgggagtgggagtatgtatttccacatgggacccgagaaagcttaagaaaaaaaaattccaaaaatgcaaacatggagccaaacatggcttcctagtcctgcagtctctccagcaagccagtgtttgtggcatacagtgtcccagctcctggctactgtctgtggggtggagccagccacaatcgccacgtactaaactgagccacacggctggcatgacagttttagatttgtctcatgcagccagagaatgctacagacacttagtaaagctaggttcagaaacacaaaacctctaaaaaggtacagtatgttttaaaatgttttttattgcttaggaggcaaagaaagaaaagaaaatgggtatagacagagaagtgagtttttaagatacaaggcagaacacacacaacatgtgactagaatattcatcacactggaaagctggggactctctaaaggactataatgaacttatcaggggccaccataaggaggttcccactgtccagagacagaataatttgagcactaattagaatgaaatttcttagtttacaatgatgcaggtttaagcatcccctagatgcccatggcagtgttaaaacaacacagtgttagcatggtctgcaggatcttggatctgaaatgtcccccaaaggcccatgttctaaaagcttatccccaactcatggtattattgggatttggtggaatcatgaggatagagactcatggcaggaagttaggtcactggagggatgctttggagggatgtgggatcccagccctgtctttaatttccagacaccatgatttaaacagccttttgccatcaatcgcttccactattgtacactgtgccagtgccagaacaagtagtaggtccaagaagctgtgtgctgaaagctctgaagtcatgaatcaaaataatatttttgtatttagaagttatctcagctgtttcattgcaataaaaaactgaccaacacatgatctaaatcaatggttctcaaccttcctagtgctgtgaccctttaatacattttctcatgctgtggtgaccccaaccacaaaataatttttttgctatttcataaccataatttttctactgttataaattgtaatgtaactatctgatatgaaggatatctgatatgtgaccccccaaatggggtcaatactcacaggttgagaaccattgatctaaatattcaatattagctgtattcatccatatgtacaggtactacttaaacttggagaaaagatcattatgatttagaaaaatatttgcaacacattgttaaaatttaaaagtcttttgctttacagaagcttctccatttcaggaggtcccattcattaactgtcgatctcaggaaagtgacaagagctcctgagcaaactgggggcatggggaggctggaggggagggatgtaggggaaagagaaggagaaaagaggaagggggaaggaggacatgagggagcaggaagactgagacaggggaagaatagaggagagcaagaaaagagataccttaatagagggagccattataggtttaaagagaaatctggcattagggaaatgtccagagatctacaaggatgactgcaactaagaatctaagaggctaccttaaatgcccttccccaataatgagattgatgactaccttatatgccatcctagggccttcatccagtagctgatggaagcagaagcagagatccacagctaagtgttgagctgaactcctgaaacccagttgtagagagggaggaatgatgagcaaaggggtcaagaccatgctggagaaacccacagaaacagctgatctgaccaagtgggagcatctggagcacatggaacatggaacccaatcacaaaattggggaatgtgtgtcagttaggaggcccgggaagtctatgggacctctgacagtatttatccccagtagccccatggagggctactctctcagcctagataccaggggagggcctaggcatggcagactttggtgatcccccatggaaggcctcaccctccctggggagtgaatgagtgatgggatgggtgggttggtggggggcataggaggatgggaaggagagggaacttggattgatatgtagaataagattgtttctaaagtaaagaaaaaaagaaaaataaataaataaaaaatttaaaagtcataatatatcacacaaagtaaatagaagtttaaaaacattcatggagagtaaactaaatatactataaaatatacataagcactataaatatatggcaagattataggtcatttttatcatgtctttattttctgcaatcaacatacatatttttgtatttcaaaatagcagacactattatcaaacatttattaatgaaaaaaatcactacttcaaaatggtggcacatgagtagaaaaatacggttgtcagattacaagcaattcttaagcctgtgttcaaagattaaatcaataccccaggtaggaaactattgatctagttcaactttgtctttttctagagtcaccaaaaaaaaatgaggtgatagctcagtgctaactttattaaacaaagagagaaagccaagaatagaaaacatatttatatgttaaggattagatttgtatgagtttgaaattaccgtggatctgtgtataagtctttgcacttcctcccaaacctaatgagaaatggctacacatggtacaggtgaatttgtcatgacagactaacaagaaactgaagactgacttcctaggatctgaggagttttcagtgtagactatggtaattgcttatcacctcagtaggcattccccctatatcagtatcacagctatgaaatgacattaggaaccagggaaattcatcattttagagaaatgggccttggtgacagatgcttcaaaatgtcttatttggttgccagggtgactgacctcaatcaaatctaatgcaaccaatgaaaagtgattcggcaaagagggcagagggaacatgggacctcattctcgagtgactccatgcataaagcaaaagtatttgccaagttacccgaatatacccagcctagtagagaatggaaaagacacttcaataaggcttagatcacagaatttcttgtattaaaaaggaagtagtttagaaaatgcttactttaaaaaggcaagaaatgagatggagtaaaaatccatgcagttaaagcctggggggataaaaaaatgttctatatcttgattttgggatgagatgagggcttattttagtggaaggaaattaaaagaatgattacattggtgtttttcctttgtgtccttaaagcctgaagagctcagtctgccctctgttctgcattcttgttttatctgacttcaggtgtgctggttttctttggaaaagactgatccaatgctgcaagggaaggcaagtcctcacacaaagtcagtgtagtttccaggtgctggggagaggggccaaataaggggagaggggccgaatgagggcttactaggcagagccaccttttggtgggactacagagcagagacagttgcacagccttgtgagtgtgctgatggcattgcattgttgaccttgaaatggttacaatggtaaatgttattgcattgaaagcatctgcaaatgttgtgccttgggaagggggatattgtggtgatattttatttacgatttattaaagtttgcctgaggatccaggaagcaaagttagccacaaaccatagatgtctggcacacacttttaatcccagcagccagaagctaggaggtggtggtatacacctttaatcctaggactcagaattaagagttagatctctgagtccaagtccacccagatctacacaagattgtcccagtcctaaagagaaacagctcacacaaagtgctcagcacctgggatcatatgcccttaatcctagcattactgaggtatataagacatgagcaaggtttcagtattaggcattcattcttcagccacactgaggataggaagacattcagtatcgggattctccagccacactgaggagaggcagcaggatcaacccatttggcttgaggcagtagtaagagctagtggaaggctactttgcttttcttaccttcagcttaaagtttggaccccaatatcagactctgggtctttcaattttcgtgctacaggagataaaaaatggggagtgctggcatcaaccagtctcaggagatggcgagcaaaggaggaaaaatagacaatcacactctacaatcctgtttagaacccattcttcatttagtctcgttaatctggttttgtttgtttgtttgtttgtttgttttagtactatttcagttgtaattgacttctgaagtttacattgaagccataagatatccaccggctgatgctagacttgatataacctcggtaattttcctcacaattatcttgttttaatattaaattgccttgtaatatctaatctttgtatatattatactatcttcaatcatgttgctgttgttcttgtttagaagcagggtttgactctagttcacctggactcactctgtagcctatgctattctctaactcataccaattctcatgcctcagacttggggcttctgtgattacagatgtgagccaccacgcccagtttcactcccatgtctttcatatgtctctattatttttgttttcatgattcattaatctgtgatgatttcctgcttttaaaaacatttgtgtcataaaagctcttgatatttaagatgcttctacaagaaaatcagaatactagctacagtcataagtatacacccagctacatgtaatgctataggctcttactccatggattctcaaagtagagatataatgcaaatagcttctgagaatacacaaatgatagacatgcaaatggcagtacaaattaagtgcattaagaacaaaagaaagtacaaaatcattccaaagctgattcccttcctgtcttctcattgcattgagattttcctgcaataaaaacagtaaaataaaacaaaaggcacttgttaaagagagggaaagaaatactattgaatatgaggctaatagtcatcagacaataagactttactgtaaggcaacgttagctatggtataaggagtgttttttaactttcataatgaaaacaactttactaacatgaaaaacacatacattagatttttagtagattcctagcaattctcttggaacataaaggtagtgtttatcaactctttgtattgccttacacatgttattataggtctgcacaaccaccctgcaaattagtacctaggagcagaaccttgacataatgaaggtaagtgtttcccagtccacaatcccctaaatgtggctgtaacaggtagcttcccaagttatatttttgtcaagcactgaatgtttcctgtagataaccccatgcttagatgcataatttccccatagttagaactatatttatctccaccctcatagcctttttaataagcaaacaagcaaactcaaaaattcattttgcaagaagactgcattgtaaatgaagtgagaacaagagttggctgagctgggcaatcagctcagatcacttatgtctaaggaatcttctgtgtatcaatcctctagaagtccctcttgctcttacactatgtacatttgtatactgttgaggtggctataaattggcatagttttgtaggagggggcatttttgttacaagttcaaatatttaaaaatgtctaagtcttttgacttggcaatttcatctgttgaaatctattctgtagaagatatggtatccataaggaattatatgaacattggtcatagttttagttatcacattgaaaacatgcaaggaagcagttaaaaattgaattgtctgtgaactgtaaatttgtattcctttattctggttagaataatggaattggactttataagcatctctctgtgctggctggcaggatgtctagtgttaatcctgcaaaacctgagttttcaggggcagagcacagatgtgcagtaacaaactaggacaactaagacagacttatcagttcctgtctctcatctctggtctgagcattttagctattcagcatagccatatatcagctatttgatttgtgtatatgaaacattactacaacagttctaagatcccccagaagtcctggatccatgggggcttgtttctaagctggagtcttggcagacattttacaaggctatttcttggttctagatgtttctgagacataagatacctgataagactagtgattttcataacaatgagcaaactggtacgttttctttgctgtacaatggtattttcttctcctccccttgaatatggatagcctttgtgacaacctcagtgaacagaacgtagtagaagtgatgctatatggtgctcgatgttagcttggaaaaaaccatgtttgtttctctggagacattcatatggaagttgtcagtgacctttgactgaacctacaaggaacctgcagtgtgaagcaagcctgcttcattcctcattgcagcaccagtgcatacactattggagatgctttgcttccttatgaagaaggcagtggaaggatctactatagcatttgggctctggttggatgatttgtcgaagatttgaggaataggtttggtctagatttggttctgttcaaagatgattaggcatttttgtggatgtggtggcttgaataagaatgaccgccatagtcttattatattcaaatgcttagtcgccagacagtggcactatttaagaggattaggagggttaggatgttggaggaagtgtgtcactgaggtttaagtttttaaaatttcatgccaagcccagtctctctgtctctgtctctgtctctgtctctgtctctgtctctgtctctgtctctgtctctgtctctgtctctgtctctgtctttctctctctctctggaccaggagaattaaattctttcttttataagagttgccttggtcatggtgtctcctcacaacaatagagttgtgactaagacagtggggtattgtgatgaccttgtttttatctgtgtttatataaaattctgaaatggtctcagactggccttgtctgaggctggtattctataaaactgtttatgtccagtaagggaaaatggtttagctgcagagtcagatcacatctggacatgagggaatgctttgtctttttcgtaactttcatcttttatcgaagaaatctggctattctgagataccatatggagtgacctcttaaatatggagaagaattgtgtagagttcaagcccccaacaattaaattagtcacaatccagctggcaggtctttgaataaagaggcctttgataaaatcacagtccagccagtttgaccataacttcgtgaaagagaattgcttagctgagccaagttaacatccacatttgtaatgaaaagaaatgattatcattaatttaagtggctcttctcaagtggcttgtttcaccaggataacttctacagatgtctggagctcttcttcgatcaggaagttctttaacaagaagaaggcacttgacgtgacttgaaagaaaccaacagcaatagaacctgaagtagtacccttagtaaagaggcttagaggaccacgaaaggactcattgacaaagagacaagcaaatggtaagggttggatgatacataaaagaagccagcaatgagaatattccagaaagggggctggtagccagaactcaagctttggaaggggatcaagtaaaagaagcctgaaaaatccgttggatttagcagcaatgagttttcattgttgaggagaaatggggcataggcaatgttgcggtggggggggggggagaagccaattgaagagggacatcaggaaggagaagatgaggaagaaagacatcagattccaggatgttttattgtacatcgtagtgctgttctctggaatatttgtgcccatataattgttttcctaccatttaatagcacttgaaccaatcacatcataccatgaatatctccaagggacatattaatactgggctttccagtcataaatatattactatatcattgaattttgggtctgtcatcataatcattttaaatttctcatgttaacgctttggcaattaaaataggacatcatttaagatagtacccagtgttcagtgttcactggtgccttgtgattatttcagaaaaatagcctcagattaaaagttataaacattgcagaaatagcttacttttgccagctaagtcaggctaatgattctagttagagcctgctgactcactggcctgcttgtcaggactcccagtccagtgtgctctcctaggagctgattctgattatgaaatgggagtgaaggcctcctcagtgacagggggtgagttactggggattatggacaaaaacccctctttgaacccataagtagatcctgttgtaaagacattggcctccttcatcaaatctctttccttcttccttttagggtctcatccattccctcattacttgtctgtgcttttcttgctagaggtgcatagagaaaactaccatggtaaggatgggaatgagtggggctaaagcctttaaatgaagtgtttatattttaaagggcttgaaatttatgtttaaagtgctatttctaaatgagattacagagaccaaaaatatatgatttatagatttagaagacaatatgtagcacacattttaaatagtggccacatttctgggctatactgaagttgacatctttcctagatccttgaactattaccaccagagtccattgcttgtgaaaatattctttttcatgtatgtaaaggtataaaaagtacatgttttgaggcaaaactacttgggcatttctttccatttttaggttatcagccaggcctaatgtggaaaatttctactcattccttaggatctgaggagactgaccctgtggagaaggttagcacttatagaaagtgactagaggtagtaacagagctggtcacagaagttgcttactgggtgtgtttgagtgtctgatgcgacactggagatcttcatatactacatttagtcatctgtgatcgaatggaatgtgccccaggactgtgaaatcttgggggagatagtctgagctgtcatctgaagggaaaactgtagcatgtggggccaaaatgaagcctgtggtggggcttagggtaggagagagagagaaggatcttggcaaatgccttgtgcacaaatacacgtgtcatctttatttgtggagtttttgtgactctctcccaggctcatatggtgggcatatggatgcaaaaatgccttttagtccccatggcaggttctcagaagggacatacaaatcacagtggcatggtgtgacaaatagatacggacaagtgtcagaggccttctggtatgtgtgcacgtaggcatgtgtgtggagacgtgtctgtgctgaacatgtcgtgaacctgaatctgatttccagatccccagatttcatatggctccttaggctgcccacgtgactgcatctgaagtagaaaacagggtgagttcaaagttcttttctctgttatcagtgatggcactatatttataatggttttggggtttcaaataccttcagcaatattgatggtgaaaacacaaaaggtagcagatgattagaccatgtgttacttcagagagcattttgtttcttttgcctttgcaaaaatataaagctcattttaaaatgagctttaattttcaattttaaatctttaaaactgtgatccaatctaattctttcctcaggcttacttagaaggaacagtctcatctgggaagccagagcatgtgtggtaccattgcttttttttttttcttttttgcatttgttattacttattataatggaaataatctttctaaatataaatagcaagagcaatgttttctgtttactgagccacacttcatccatctttgtacatatttctattcagtgagatcatatttagcatagtttattatcccttcctatcctaatggaatcccaaggatgttgagatgggataacagttgtcccaaggacatatcctattatcagaatcccagctagaagcttgaaccttggcctgggtaacttattgccttcttgttccaacaagtagttcttccaactgatagcatcactatgtacagtcctctcatctgctaggaaggtgtgatgacttttcttggttgtcaacttgactacatctggaattaactaaaacccaagcagctgggcacatctgtgagggattttgttttcttaattagatcatttgaagtagcaagactcacttttagttcagatattctaaggtgggaagatacacctttaatctgggacataccttttgctggaagcctatataaaggacatggaagaaggaagcttgtattatttgcctgctggctttcactttcactagtaagtctattccttcactggcattagagcctacattggcggggagttgtggcatatactgaagaccagttgagatatccagctctgtggattgaatgcccactgtaattggatcttaaattggtagacagccatggttggaatagctggaccacagcctataaaccatcctaataaaagacacacacacacacacatacacaggcacacacacacacacacacacacacacacacacacacacacacacacacacattcattctataagttcaattcctcgagagagccctaaataatacagattttttttgtggcaggactggttctgaatcagtcctgcaaccatgcaacagaagcataagggtgaatattttaagtatctcgcatggctttccagtttgccaatacctgcagttaactgaagcctctccaattactgaaactttaccaagaagcttggagagtactggaatatgtagtgtgaactattttacaaactgaaaaaacaaatgcatttgtttatgctgattcaccaattaagagagccaatggctctgtaaataaaacttttgacaatttgtgggaaaataaggacaataatgatgctggctggttgctcatagcacatctggataagttgaaaaaagaagagaatgagctccatgatagaattaaccaacttctaacatctcagactacaatgaaggacaacagtaaactcagtgataaaattgaccagctccatatgtccacagtctaaaagtttttaagtgtgccctggaagagaatattctttctggaagtcaaggagctcaagttccaggaaatcaaataaaagcccccactataaaattggctgaattagaacaaaaatccaagtcccagcctcagagggggttgaccattaaagtaaggttattatcaggtaaagaatgggctcctattccttggggtggagatgtgcaggaggaccctattgaagctgagaactttgaaccttcaaatcctcaagctttatctcacttgaggaagtagtcttttcactctcaaccaaagatgtattcccatccccaccccctgaaattttgcttttaaagctttggactgaggaaattaatccttctttgtctgctaaaccagcagtaacttttttttttcagaagagatgcctggaaagacaatactgaattccctcaggccccaccaatagctgcctgtagacctataactagacttaagtctaagagactcctcaaggggaggaagaaagtgtagttgatgaggaggtggctatactataaagagcttaatgagttttctaattcattccagcagaagtcttgctaatatatgtgggaatggattctaagggtatggaatactggtggaagaaacatgaaactggattaggttgagcttattgacatggacccagtgagtagagattctaggtttaatatggaagctcacatagttaaaaaaaaaaggaaggaaagaaggaaggaaggaaggaaaggaaagggagaatgaaaagaaggaagaaggttgttaaaagtttcaatagtttgctgaagcatttgtcaaaaaatggctcactgaaatggagttggagttgtttgctattccttggcttagcgttgtggaagggatcttaaggctcagggaaattgcagtactagactgggtatgctgtgtaaaacttaatccttcacaatgggaaagcccagaagactagttctataagatacaaaatggtaagaaggggactggcacatgatgagctttgatgagctttgttgttgtccttttctttgtgtcaaacacaagggttggggatgctgctgctcagttgcaataattaaattcaatgggtttaaccgagcttcaaagtagtggggaccagatggcagcagtgaaccatcaaaagcaaaatgataatagttatcataatggttagcatagagaaagaaatgtctataatggcctgacccataattgacagcacaggaaaagtgatttctatggtagcatgacttgtatggatttttggtactggctgataaatcatggcatttacaggcatgaaatagacacaaagcatactgcatttttgcttgatctatataagtggaaaaattattaaactaatgaaaaataaggctatgtgtggtaaaaggggaatctaggcccatgaaccaatttccaatcttgagtcagtttgcaaatccagaaccccttgaatgaaaggatggcctagttcccctgagaaaggacattgataaagtatctatgaattttcctgttagcctttctccagtccttccccagaaggacctacagccttttacaatggtaactgtacactgtagggggtcaggaggaggaaacaatcacaatttcaatcatctattggatactgattctgagttgacactgattctgggaaatcccaagaaatattgtggctctctagttagagtaggggttatggaggtcaggtgattagcagagttttggctaaagtctgattcgcagtaggttcagtggatcctcaaaatcacccaatagttatttctcctgtccaagaagatatacttcttgggatatacttagaagttggcagaattctcacattccacgacctgtgaggtgagcgacaacatggttgcaaaggctaaatggaagcctttagagttgtgctgccaaggaaatcagtaaatccaaaacagcatcacatctctgaaggaactgcagaaatagtacttccattaaagtcttggaatatatagggaaggtgagagttgactgactgaaaactcattcaggtagtgactcccactgaagatcccattagatgtagtgaccttacttgagtagactggtacacagtatacaactattgagtagcaaatgctgtcttctcaggacctgtccataaagaccaccagtatcaatttgctttaagttggcaaagctgtcagtagacctgtgtagttttacctcaaagacatattagctctccagccctatagttcataacttagttcaaagaggtcttgaccatctgtatcttccagaaaacaagaaaacatattgattcactctatttataacattatggtgactagaccaagtgaggatgagatagcaatcactttgggcttgtggataacacataggaacattagatgatggcaaataaatccaaccaaaatttatgggccttctacttcagtaaaattcttaggagcccagtggtatggagcacacggaaatattttttctaaggtgaaggaccctccacccttcccagaaccaaaacaaaaccaaaaattagtaagattgtttggattctggaaacagcatattcctcactcggttgtgcttttgccaaaaccaccatctatgaacttacagaatgctttatttaccatcatggtattccacacagaattgattctgacctgggaactcacttcacagcagagaagtgagatagtgggtacacaatcatgaaatctattaccacatttcccaccatcctgaagcagctggcctaatagaaagatggaatagccttttgaagacacagagtgataattaggtggcatcaacttgtagggcttgggaagggttctccagaatatagtatatactatatatatagtatattgaatcaatgtacaatatatgttacagtttctcccataacaaagatccacaggtccaggaatcagggggtggcaaagagaatagattcacacaccatcatcccttatcatccactagaaaaatttttgctatctgttcctgtgaccttaagttctgttagcctagaaattttggtgccaaagtggattgggggtattcctgccagaaaccatcatgaacattgcattgaactggaagctcagattcccccctgaccacagtgggcttctgatgctcttaagctaagaaaggaataacattgttaggaagggtgattggttaagattaccaaggagaaattggactatttctccacaatggattatgtctggagggcaggagattctttagggtgtctcttggtgctaccatgtcatttggttaaagccaataggaaactacaacagcctaatccaggcaaaatgaccaagagcacaaacccttcatgactgaaaggtataggtcagtccactagggaaagaaccaagacctactcaagtgcttgctgggaatggaagaaatacagaatgagtagtagaggaaggaagttataaataccagctaaggccaggtgacccactgcagaaatgagaattgaatttgatatgagtatttctgtagtattttgttaagaatgtgtttgtgaagatatttgtgttttctttatcatgtaatgtaacattagttaagaaaatatcagtggttattatatttaaatttgaaatacttcctgaaagaatctcactcaaagggatatttccacccattctaaaatttataatgtgttttctcttatattcaggacattaggcataattatgaactggttattattttcattgggaaattaagcatgacttaaggagatatgattgtgtgtcaagttggcaaagggtggacttgtgatggctgttagcctgacaacatctggaattaactaaaacccaagtggctaggtacatctatgagggatttttttcttaattaaataatttgaagtgggaaaacccacttttaatctggatcttttgaggtgggaagagccacctttaatgtgggccacatcttctgctggcagcctatataaagggcatggaagaaggaagctttttctcgttacttgcttgttgttcttgctggcaagtgtattcctttatggcattatggcctacttctttgggattctagcatatactgaagtccagctgagacacccattctcatagactggacaactactggattattggaacttccattggtagacagataatgttgtactgggtaggtcataacctataaaccattcacaattctaataaataccctctctcatatatatgcctatgtcattgaagggtcaataagctagtgggaaattctattaagaatattggctatgatgggctggggttgtaactcagtttacagagagcttgtttagcatacacaaacttctttatttaatccccagcatcacataaaataaatgtggtggtacatgtctataatcccagaattctggagacagaggcagagggatcataatttaaagcttgcaattgaccacataatgagttcaaggtaacctggaggtactcacaactttgtctcaaaaagtagaatattaattgtgagctggtcatggtagtacaggcataggttcttaggaatggcatggtaggaagaaaacatgcccaatagctgcttaaacctacagagttagttgaagatatcctaggcaacatagagagaacctctcttaaaataaaaaagtaaaaaccagatgagagacagttcaattataaatcaggtatgactctttgatacttagtactggcaaaaataatattgtttatgatgcaaagtgtttcatgctctaagagaagttacaatgtgctattaggttcttcccatgcctggtttgtgtgtgtgtgtgtgtgtgtgtgtgtgtgtgtgtggtgttcgaagccaggctaaggacattgcagacacggacacagaatgtatgaagtcaagggattgagatggaaagttacagattgtttggttaaactcagtgaggcagagtatgagaatacaagtgtttgagaatggtgaggctgtgaacttgaatttggaatctctgtagacttacaagtttccttgataagacaggtatgttccttcctatttgatgtttttagatctcttaagtacacactctaatagtcataatattttccctaagaagagatgcaattaatcagaaatttatggcaaaaaggtctctctgggactcaagatagaaaattatcatcctagccaaagaataaaactaatgaaaacatccagtattagtaagagcaagatgatgaggacagtattttgctaaatagtctataaactgatttaacacgtttgtgtggccatacacaatacataataagatgttttaaatatttatgttgtttgagtcaacagaatgtgttttggaattctataataagaaagttataataaatgtttatggcagttttttaaatagtgaatcatcagaatcagcctaagtagttatggtatattactttgatgcgacttaaagcatcattagcaattctgtttacaaatagcctttaaaatacatttaatagctgagcatggtggtgaatctttcattctagcacttggaatcagagacagaaagatctagtttgaggccagcctggtctacatagaaagttctaagccatctggggctacacagtgagaccttgtttcaaaaaactattgcatttaatataattatggatgaaaagtaggacactgatacatttgtgtgtaggtgagcacattcaccatgcacacatgcgtgggtgcacacacatataaacacacattctctctctctctctctctctctctctctctctctctctttctctctctctctctctccctctctcccactccccccactctcatacacatgttcccagacctataactagagagagagagctgcctgtgtgcgaccctcatatttaaagtcttcttatgtcattctgaccatgcccaagtgtgcatggtctgcgtcacctgtgccagcctccaagtgggtgtggccagcatttcccctacatatgacaataagttaaaaattgtactttaaaatagtgaattcagggctagtgactggctcagcatttaaaatacttgctgccaagtctgttgacttgtatttgattcctgaacctcacatggtagaaagaaagaaccaactcctgcagattgttttctgggctccacacacagcatgtcatgaatgtattccttttcaaataaacaacagtaataaaaataataaaaattttcatttaaactccacactgaaaaaagaagctggaagccgggcattggtggcgcacgcctttaatcccagcactcgggaagcataggcagacggatctctgtgagttcgaggccagcctggtctccagagtgagtgccaggataggctccaaagctacacagaaaaacactgtctcgaaaaaccaaaaaaaaaaaaaaaaaaaaaaaaaaaaaaaaaaaaaaaagctggaaaggaatcttggaatgctaataatggtagctggttttagatggtaaaagtatggatacttttttctttatgattttatacattttaaaataatacttttagctttacaatacaatttttatttattcatatataaatttacaaataaaacgtatttcatagcatgtgtactcacatatttgtgtgtgtgcttgtgtgcatgtgtgtctgcatacaggcctgcctgttcttacagaggtcagaagaggattgtgggttccctggagatggagatacaggaggtcaagagctgcctgatgtgagtgttatgaatggcaatctgttctctgcaggatcaggaagtgctcttaaccagaagaaccacctctcatgcttatgactttataatttttaagagcaaaactaaaatgatgggacattctgtgaatgaacacaaaacatgcactatggtgttcagttttattgtatgtttccttatgcttgctatactcttatacatctgtagctggggaactatttctttttataattctcaatcttagcaagatttctcttgctatacctctgctgaactgggtgaaatctccccacccctctacccagccacttgcctttgactttctgggaagatagaaaacttggtaatttatggtcaacactgaataaattactaaagtaattataatctacaagtatcacaggaactattatgcactgtgacattttgtgttgtgaattagcaatcccaagttataacacctataaatagtttctcatcaaatatgaatttatttaatagttgtttctccaactattgatgggctatttctttagagagaagttgctagaagagtaatgatggtattttgtgccagtcctccacacagttgtctccttgaaagcaccatatctggatctgtgtctcattgtctagagacaatccaaacaacacatctacagaacccataaaattaacagtgcaagaagaccaaaaccaggaacgcgaaggtgctaagagaaagaaaggcaagatacacagcctccagaggaaggtggaagtgggccaagggagggcagcaaagagcacaaggacatgaagtaacatggaaacaaaaagacacccttgctgagggaggtctggagagtccacagtgcaggagctttcccagggcttggaatgaatgggaaggcaatggacatgagacacagagggagctaaaagctcaattaaaacactctaagtgaccaaacatagtggtgcatgcatttaatcctagcactctagagttcctggccagtcaagcatacacactaagactctggctaaaataaataaataattaaataaaaataaaaaaaaatactgtaagtgcccacaaggaaccaagaaaagtaattgaaaaaaaaagctcaaaatttaaagactcaatgaaataaaattaatctgtatttaagaaaggcatgttgtacagattggaatagctcatagacaatagcaaaagcacaaagaacaaagacactaatgtgacagtcttaaagggactggaaagatggttcagtaattaaaagcaatgactattcttccagaagacctggatttcattcctagtactaagtgacagcccacggatgtctgtaactccatttctgcagggatctgatgcctctatgggcactggagcactgggcatgcaagtggcacacagattcacctgaaaacaaaacattcatatacataaaaatttaagtaagttacttacatataatttgggttttaaatatcaacagaagaaaaacattttttttatgaaaggggtaaaattaaaataaactctaactcttcatatgtaatactgaattcctgaagaacttagaaacatacaaatgattttgtagttgactgcataggatacacacgtttaagattagaaacacctccttcattgataagacaaatggaaaggtgaattttcaaaacagcagctctctctatatattttcctgcaacaagtaatataattgtaatggataaaatgggctttaatatggactctagtcactgagagataagtcaaaagacaattttaagaatcagaggttagtatttgaggataagtagagtttcccacgttttgtttaatagtaataaatagatccagtttaatgagatggctcttgatgcttaaaaggcaagtttggccctacctttcctcctcttttttttttaaaccttttttattgtttttaattgatgcatagtatctgtatatatttaattagtacagtgtgaacaattggtacattattcaaatgtgtgatgttaaagtcaagataaattgtaatttttgctagccaattaatcctttcccatttgaagctggctgtgttaccaggtggaattgttcttctgcagcaaaggtcaaatacagattgatgttcctgggacatttacaatgccatggtcctgctctcagctagtgtttaagggacctcattctttgtcctacccgggcatagccaaaatgggaccacagcagacactaaacctagttgggccccatttatatccaaatgtggggctagatgtttaatttctgacttcattttcttccttcacacattgagcttagtgatagtttttattcaatttctttgagatccaggattagatggatgctatatgcaccttttgactggtacattatacaaccttgttgtatgttctgaaaacaaaacaaaatataacttcaaaacaaagcacctaaaatttctctataccagctaaaggacagaaactatttcctccattattattacaacttttggtgatcaaatatgtgagaggtttcctaaacctattcaattcagtctgtcagacagttaaggtattatgaaattcagttcagttctgataatatccccaaatagctgcagatcccatgtattaaaatcttagttccctaaaactgtcccttttagatgaaaaaggagaataaggattgtcacttatgtggctagaaatcagagggtcctgtgacctcttcctcagatctgatccctgctagaatgactcccagaagccaaggaagtagttcatttattatgtgaaaggaatttacaagttagggacagatagaagagagaaatagggacagtgtgcgagaagggacaaggagctccctgcctcttggcttgcctcccctcacagagcttccacatgtttatcggcacacaagctctctcagcttattcccctagggctttctggtagattcacaacatgggcgtgattgtcctttagcaattgtcaccaccatccttcttccctcctgaaattgctgactctctaatgatacagcttcttttttctggtcaccagcactgcccccctcctgaaccctaaagatttggtaaaagttgccttatgaacttaattaaactcaagtgaaactgagaaggacttgttctgaacaataaatgtttctttttgttgggtccaaagtgggttcccccaaatgtcagtaccactgacaatgtcctaaatgacagtctgggctcagctcaggctagattctaactaattcttatagcgtgcacgaagacgatccatagtctgtaaggctaagatttctttatttagataaacaccagccaaaggcaagccagagtgtgcccagaggcagcaagttagcgagccagagagaaggactctccacctccatcctccacctcccctggccacgcctgtggctactaggaggcagggctacagtgtctccctacatattctaaactgttaaagataatgaaaacacacaaattaatggtcaatcaccttataaatgatcaaattctttaatgtccccagaaccatgttagtagtcatgctgtaaataaatttacagggacaagcttagaggaatagaccaatttatatctatcatataatctcttgtgtatattgtgaaaataagcctgaaaacaagcttaaagaaaacttagtttgtttaatgtaaaataatattcaaaatcagatatatattaagatgaacttaatagactagaccatgcccctcaaatccctcagagagatccaatgaataaggcatttaatggaagggagaaacaggaaaagatgaaaaaggttttctgcaacaggcagaaatgccagctctggcatcagccctgcagccacctcaaaggaagatgaggcatcaactgactccatttggcacttgcttcaaatgtggcaacattggggtcattggtgacaaactgccccatgcttaacctgccacgaggaccatgtccaaactgtggaaaggcactggaggaaggaggtcgttcctgcatattccttccccacaggaaaatctcttggatcttcctagagcctaatggtcaaagactcacactgtcctggaatcttgtcccctgacaacaccgtcaagtttaccatggagaagcccaagttaactggccagatagctggtagctctctgttattgttaattgataccaagaccatttcctgttctctctggcaaaaggtatccttctcagatctctgacaggcattgatggccagccccatcttgtcccaggtcatgtcttcatcagacagtttagcacgtctgctacccactgccacagcaccaaggttgcttcaaacagtccttcctcagagactgcctggccagttctgggtttacaataactttaggtgcaaaggaaagatatgccacttgctgatgatacagacctgagagcttaaaagtcaaagtttaaattacccgaatcgcttgaattaaagaaaaaattcaaaacagaggctaattatcttccagcccaaattagtttcaagaattaagggcttcccagtgaaatagttaaactcacagacagtttccaataaaaagcaaactaaaaactaccacactgttggtgctgacttaaaaaaaaatcaccaccaacaacaaaaaacctctttactattcatttatggtctaatgataactttaaaaggacttttttttttcaactattcctttcaataatcgagcacctatgtctcatggaaaataataggatatttaaaaatgaaaaagaaaggtaaagttttaacaagctatggtaaagattaagatggctggtgttttcagaatggaaaggagaagtagaaggtttctataaactgtgagagtctgaagaagtggttgaagctatgtgaaaaatgagacttaaaggtgatattataatattaaaatttccaagttcaaaattgaacacatcaatgttagacctctacatcaagagagttgctgcaagttattaatctacttttgataaccattttaagtgttggctattaaaactttaacaataattaaaatgtccatagtcacagactaaaaaaaattttcctttgttttctaaatataggcttgcttcttcttatgctagaaacagcactttctgatctgtaggtctcccatttattttaaggtggtggtgtgtgggtgatgagaagacagataagaaggcatgcatctgtcccagaaccatctctcaggcccttgagctcctcttccccttctctttcttgtcaggaaatttctgtcttaccagggattaattttgctaaggctcaaaaaccacgagtctattcaagctatatgaagatgcttattaactgcttcctctacaatgaagacctcaatacacattcaagcagtccatggtcctcctgatacaatgcaaatgtttctgtctttttgtcaagttaaagaaataaattgtgtaatctgcagggggtcgctacttggatccatctgtcacagctcaaatgagctctgtaccttttgtctgatgagttctcctaccagtcaatgggactgcaaaagtttcagctctcctaactattgcctacccctgaatgtaactatatagaatacaaggaaatttcccgggtacctctggtaaaaggataccaagagagtcaatgtctagaatggaacttcagctatattcccttcttgggattgccacctgccttctgccttcagcagagtaaggaaagaccaaacttcttaatacaacaggcacagcctctagaagtttgggactgatctgccttgatcttcataagcttgcattgtgaagaattgtgaacatatttctattagaagcatctttaaatcttttggatttggaccatcctaagagtgagtaattatggaagctgagccaactcagaagactcatctgcagtgaccagtgttaatggaataaaataacacactgtagtgtggggttagtgttctgtgtccttagttcttcagctgtgtctttcattgtcttactggtaaagacaacaacctgcatgactttgattctatggccagggatgatgtggtccgtcaggtatttgggattaattttgcttgttataattggtaccctagcataactgacacatagcaggcagaaaacaagggagcagttaagcactttagagcttcatagtcagttaccactggaagaactgcgtggttccaggagtcagtagtgcaggaattgagaaacttttccctacagaagactggcagagtaaccagaggctcaggacaaaagcctgggatccagcagtaaataagtatttaagcagtatggtcaaggtgcctgggtttctgtggatagctctcttactcctgcttctgaactcctttgtcattgtgagaggggcacaatgtggttctcaggagatgatgaattctgcttcagagtattgcttcaccatagtggattactgtctccacttgggtggagtctgttgtttgggggtagtttgactcccacctcacaaagatgtttatcaaccagtctagttgttcccggaatttgaagtgactcaaaaaaagttaagaaggcaaatagagccaaagagggacaagatgaagttagtcaggcccttctttagaatttctgttgcacattttttcaatcaataagaagaagagatatgaaggataaaggcaaaagtgtcattgatgcttagcagtccttaggtctggctattattttcctgttttctgggtaggtctttctactaatggacaatagaagtaagaaaaaggatggttctaacacaaaacaaggggaaaaaaagtttattgcagaaatttgctacagcaggctactactgcaggaagagcagtcatgaacagagacttttttttatggtacaggtttgattatgaacactggtcttgagtagatttgcccagagtttcttgatttgactgactggcttgcatgcaactggatcagttggacttgcaggctccatgattcaatttcaggcatttgcttattgattgtaaattaccgtggtgacgactgcccaccccacatctagaaacttcattcagatctcagctcaaatgcaacctgcaagatgattttcttaccaacttcccatttaaaacaaaattaccttccctgtgtctaccacctttcgtattaccctgaaccctgtcttatgtgctcctttgtaaaactatttacaagaaccttattcattcccgcatacattactgacttctatctctcacttctgaaatactataatgtgtgatttccatctctatggaatgaacttgaggtcctttatctattttgaatcttccttttaaaaaaaatgattcattgggtagtcttgactgttctaatctcggcatctcgaactctcccactgtcctttattcttgttcaggctttattgaggcatactagtgtcagtagatcctgaaggctctcccacccttactgtgcctgcggtggctagtttcacgtcaacttgatgcaaactggagtcttctaaaaggagagagcctcaattgagaaaatgcctccataaggtctggctgtaggacatttcttaactaatgactataagaaaccaggctgagcaagccatgacagacaaggcaataagcagcacccctccatggcctctgcaccagcttctaccttcaggtctttgccctgcttgagttcctatccttcaatgatggacaatggtatgtaaggataagcaaaataaaccctttcctccccatcttactttaggtcatggtgttttatcacaacaatagtagccctaactaagacagtcttttagcttgtctgacgagagaagctacgaggatttaatatgaatgtagatcaggagatgaatgccctgctgaaacacccacccagtatttctctgtggtagtagcttaatggaagagtgaatgaggccagaatgacttgccagaaagtatctccagtcattcttgcaatgagagctagcaacaattgcatagtgatctggtggatgaaagactacaaatccatttttcttggggagttaagaactatgagaaaaaaatgttgccgttactcttcattctttctcatgccaacaaattagtagaattttatttcactttaatgcacaataatttttagtcttgacaagaaaattgatatttgctgctgaaagcagttaaattattgaagagctcagaaaataggagtgatttataaattagccaggtctgggtttactttcagctctatgtttttccatgtacaggcaacatttatttaccaaaagtatgtatttattttttatagccaagaaatatgtgaaattatttggatgtgttgtgaattttattactggaagctaactactgattattcttaatgcaattcattccattttgtgaggtttctgtttggaaattttgtgatgtgaattttcataatgtatgggaagacttttagagaatactaatgatccatttcagagacttgatttcataaatttaaatatgatctataccattaataaatataagataaattgggcattgtatgcctaacccaaagaatttttatagcaactttttaagaactagaaaaaagaaaaaacaaaccccattttaattgggaaaagataggtttacataaccctgtaactctctttaaagacacacatgtgcacacgcacatggtgttggactttcctgtggatttttattcagaaaatgcatatacaaaatatgttgctatatataatattgcttatatgtaatctctgcaacaaattgcctctgtaggttttgtggatgctttcacagcctctatgagttcatatgacatctgatccattgtgttaagaagacagttttcttgaagtcatatatcacctttagcacttaaaatccttccagtccttctgcatagattcctgagacttgagggagagaggtaccataaacatcacatttaagactggatactctgaagtctcttattctccacacattgaccagttgggggcttctgtgttaatttgtatctactgcaagggggtagcttctctgacaaaggttgagagataaactgacctttgagtatagcaacaagtcatcaagactcattttaaagctctttttcacttacaagaatagtagaacaggtttttccctagggcttgtgacctatctagccacaggctcttggatttattggcatgtcagatatacgttccatcctgtggagtgggcttaaatcccataaaaatttgttggttacttctataacattactatgccactatggtaccagtgggtatgtcttgccaggcagatagtttttgtaggtaacaggattcatagcagagtaagatcaatgatttctcttctcatagagtacacagaactttgccctgcatgccagaagagggcaccagatctcattatagatggttgtaagccactgtgtggttgctgggaattgaactcaagacctctggaagaacaaacagccagtgcttttaactgctgagccatctctccagcccagaacttttcagcactatgaaagatagatagaatgaagcttccagttgagtatcaactacatttccccatgttctatgactcaagtatgtgggatcttcagcaattgggtgttaccatcaagttctaaaggtaactgatgcctctggcaataatctataatatttggagtgggccacattgctcaataataactcagaaagaggtaactcattccttgtattggaattttagttagtagcatatggtgtccagttagactattgttcttttattataggctaactccatttaaactccttttacacacacacacacacacacacacacacacacacacacacacacacacacacacacacacacactctttaggaagctctacagtaataggtctccatatggcttcacggaaagcctttagtgttagttttccatccccatatttgttcctctaccctgccattcagtcttccactccatttagcttttattgctttgtccccaccccaaacacactttaatcttactatagcactactttgtgtttttccttctttggaagatcccctcctcccgcatgtcccttagtagtcatctcatctctatgggcattataaatgaaatatgcatatctaaagcttaaatgctgacacccacatattaaagaaaacacgaaaaaaattgtctgggtctgaattatctcacctaggatggttgtttcccattttatccatttatttacctgcaaattgcacaatttcatttttcttaaacagatgaataatattccattgtatgaatatatcggtttcatttcattgtttattgatgaatttggtgaacatctagactgtttcctatttcctggctattgtgaagaaaactgaaatgaacgcagaaaaacgtgtttctgtaatataatatagattcttttgtgtacatgcccaagagaggtaggtggatcgtgtgttagatccattttttaaaactgtgtaaggaacctccctactaatctccacggtggctgtatgaatttccactactaccatcacagaataagtattccactttgcctggatcctggaaaacatctgctgacatttgttcatttgaccttgcacattctgtctggggtaagatgaaatcccaaagtagttttgatttgcatttccctgatggcgaaggatatcgaacatttttaaaacatgtttctcagctctttgtgttttatcctttgagaactgttatttccatgctccattgtttaaatgggttattggctctcttgatgttcagttttgttgttttttatttttccttgtatactctaaatgctaactctttgttggatataattgttaattccccccaacccgtgctacaggctgcctcttcactcaaatgacagtgtcgttttctatgcagaagtttttcagtttcaggtgacccattgtcaactgtttttaatgcttgtgctttttggctcctgttcagaaagtctttcctgtacttactagttcaagcatattccttgctttctcttttactaaatccagtgtttcagattttatgccaagatccttgattaatctggagtttggttagaagatgtagatctagttcccttcttctatatgcagctatgtagttttaccagcattatttgttgaaatgctgttctttctctacttctgggggggggcagtatttttgcctctttgtaaaatattgggtgtccataggtgtgtaaacttacatctgggtcttcatttctattccattgatcaacatgtttttttgtgccaatgccacaatatttttaatactatagctctatagtatggtttatataatcaggaatagtgataccttcaaaagttcttttattgttccagatttacttagctatcatgcttttttgggtttccttgtgatatttaagtttactttttcaatttctgtaaaaacattgtgttgagatttttatatggattgctttttagtaggatagccattttcatattaatcctagcaatctatgaacatggaaggccatttcatcttctgatatctgctttagtttctttcttcagtgtcttaaacttttattatacaagtctttcacttgcttactgagagtcatttaaaggtatttttgagggagttgtgaaagatatcattcccctgatttctttctcagtatatttatcattcatatacatcttcttggtggatttgtttttctataatgtgcagtgttgctccctatttcttatgtctctgggtcccttcatgactaaatagatcttgtacagggtatggtcttacttattttttttccagccaacaattctagacaagtttatttatggctgtggagtgaaaaaatgctagcagacatattgacctggttctaaagggatggttcagctcatagctctcactagagactgggcaagtactgttccatccacagcaaaaccaccagctagagactgtggactcacagaggaaatggctgccttgcttgactgtaaagggtttattgccacataattctcagccattgatggacatctgtattactctctctgagtctcagaggacccaagagccaaaggagtgtgtgctctgctggtgttttcctctaaattgcagtgtttcccccatattgaaatttttccttcagggaagaactggaagctcaggagcctcaggtggtaaataggtcagatgtctggaagaacagaaacttgtgagattcttgaaggcccagcagaataaaaccgagtgaacaacagctgcagggagagactcactggtagaagtgcagaggaaaagagctctactttgtgtgcttcccagggatgtaccacttttttatggtgatttttttatttaaattagaaacaagcttgttttacatgtcaatcccagttccctctccctcctctcctctcctgccctccaccaactccctatcccatcccctttctgctcccctggaagggtgaggacttccatggggatcttcaaagtctgtcatatcatttggaacagggcctagaccctcccccatgtgtctaggctgagaaagtattcctctatgtggaatgggctcccaaagtccattagtatactatggataaatactgatccactgccaaaggccccatagattaaccagacctccaaactgacactcacattcagggggtctggaccagtcctatgctggtttcctagttatcagtctggggtccatgagctcccccttgttcaggtcagctgtttctgcgggtttcactagcctggtcttgaaccctttgctcatcatcccgccctctctgcaactggattccaggagttcagctcagtgcttagctgtgggtgtctgcttctgcttccaacagcttttgtttgtttcttaagtaatctctgttctttgtaagtaatccctcaatcacactctgttagtaactccaatataacccctttgaatcacattgctgtgatcattactttggtctgtcatgggttccctttctaaggtgagtatatattcatgtcttctcttcccaagcaacatctgtcactgaacaaaaagcacataatgactcactggagccagaatgattcaagaatcaaatactgttgagaaaccttgaaacacttatggttcacagtaggtcttccagataagtaagtgccttgttgcaatccatagaccaaggaatgaaggtttagcaatagttaatttgtgtgtgtgtgtgtgtgtgtgtgtgtgtgtgtgtgtgtgtgtacgtgtgcatgtgcacaagtgtgtgccagcctgaatgacttatgcatgtggtgtgttcatgtatgtgtgtataccagtgtgtactggttagttttaactgccaactggacacaacctagaatcaattgagtcttaataaagaaccatctagatcaggttgacctctgagattttcttgaatgttaattgatatagaacgacctagttcttcatgggtggcctcattccctaggtatctggttctgaacagaataaggaaggagaaagctagctgaaagcaagcaaacaaggaatgatacatgaattagtgctgttagagcttttgcttatgaatctgaaacactaaattcctgtcttgacaatgttagactctaacctaaaactgtaagctcccctaagttgcttttgctttggtcacagggcagatggtgtgtgtgtgtgtgtgtgtgtgtgtgtgtgtgtgtgtgtgtgtgtgtgtgttgtttgcaaatgtgtgcatgtgtgcacatgtgtagaggccaggaatcaatgttggatgtttcttcatcattttccgtcttcctaatatttttttctgtgacagagtatctcagtgaagctggagctcactgatttgacaagactaactgaccagcaagttctcgacatcttcttgtctttgctttgccaaaatggaattacagacacccaattttgtgtctagatttttgcttgagtgctggagatctcaactcagttcccatgttaacagaggaaggattttacagactaaactgtctcacaagccctgaggtttataattcttaataatcagtggtgtcatcatggttaggagtgtacactgatgggtggaatacaaccctgccatgaggtcaatatccatgccatgtagtgggtttttctctcagaagctcagtatccctgctgtggagtcagtaaccctgccatgtagtcagtatgccccccactcaaactttctcactggttcttcctacattccccatgtgtaggtagaggaacttcggctgaggtccctgggatgggcccctgtgtggatcttcttcacatcacagtactctggagttcctctctatctgctcttgttgtatggggacagcccctgggcagttttcttcctctacagtgcccaaaatgagcataccactatgccatccataaactgcctgtaccacatgaccaaagggtcctgaactatgtggatcctgaagatcttatagaagtcataattaatcaaagaaacagatattccccaagttgtagcatgactgtggcactggttgacaccttgcagcctgtagatgacttgagtcagagacaagtagccatgctcaggccaggatcttggtccagagaaacctagagataaaaaattatcagtgttttccatgactaaagatgtggtgacatgttatttataatttactaaaacttgactgaggagtcagaaaagcaaaggcagcctcaaggtatagagatcaagcagtggtgatacacacctttaatcccagcagccagaagctaggaggaggtggtacacaactttaatcctaagactcagaattaagaaatagaaggatctctctgagttcaaggccacccagatctacacaagagtgaatcagtctaaaggagacttagagttcacacctttaatccctacattagggaagtatataaaacagaagcaatgtctcagagaggcattcattctccagccaaattgagaaaaggttacagtctgagactggtgagagctcgtggagacaggatcaacccattcagcctaaggtagatgtaagaagctagtatccagccactttgcttttctgatattccgcttgaagcttgaaccccaatatcagtctctgggtcatttatttactcatgtcacataaagatctagaagtttgtaataaccagcaacagataccttgcctagcttgagtggtgtgtccagttaaatcccagctgctcaccaccccacaaaagtcaataaaaaacaagaaaatatagaaccctctaatcaaaggggtgtactatatatcgttggtccatgtaaaagattgagcaaaaggaaatggttccaaattgtggcaaaaaaaattctcaaatattggctccaggttcaggaaaataaaaagacacaaaaaccaaacagatagtggtaaatgtaagtattctctgagctcccagggaaggttataggggtccctttctgagacccaaacaccacagaaccatcttgttagcaggaaagagagtgaacaagtgctattaatgccttggttctagcatcatggctgaagtctccctttgtcctactggatattttcaggatcaagtagcttatgcacactgatccagtgcccctgagtaatacctgggagtgggtgagaattctcctcttcagatctttcttacagctccctggcaatcttctgctacaagtagaggctacatcttcacacctgcagtcatgttttccaagaagagccaggaggaattaggtctaccacaacagggcagttagtgtgcacataatctgttctctgtgtcatcataaaattcctcatctggcaataccaaatgcttttattagtcaatgttctctaaaagacagaactaataaatcaaatatatatcataaggggcatttcttgagttgacttacatgataggagctgggtaactcagcaattctcatttccccaaaggagagactaagaactgtgtagccactgagaccatcagactaaatacttcaacagtccctgaaacactgaaggcctggaggattcctagatattcattcatcatccatctgtttcaaaagactgtaattctaatgtcagagaagggtggcagcaggagatacctatcatctatctatctatctgtctgtctatctatcatctatctatctacctgcctacctacctacctacctacctacctacctacctgcctgcctctactcagcagctagaagataagttgggaaggcagatggcttttcctttggacctctttgaattaggtcacagttggatggtgccacactctcttgggaaggtattttcctctcagttgatccttcctggaatgttctcccagaggcttcccatggtttattcttgtgattcagataaacaacctgaatacatgaataataaccatttcctggccacctctaccatgacctttgtccatgtctagcatatcgaaagcccagctctcttgtgataagttaaaacccacaaattcacttctatcttgggaacattgtgtatgttagctccgcaggaatgttctatggagtgtggtttaccagttaactgtgacattcttgtaagtggaaagcatgtactgcatgtctgcattgtttttatcccaaatcatgccagcatacaggtttggtcttctgccaaaaactgagtatgtgatgggacaaaggatgagaatgcatcttcttttctgctgcagtcagttgttcttctactaaggagctttgctgccattaaagttatatgttaatcaattctgtcccaaaagtgtaaaaattttgagtatagcatttctgtattaaggtcttctgttatcctattagggcagatgggaaaacccaaattgttgccccctgccagttctgctagaagtctacacctctcatctttgtctagggattgcctacttccactggtgatcattttctccaggaagggccacaccttccctaagcaagctgagacctgagtggtgtacttcatcagtatgcttaaacatggaacaaaatctgatgcctacagggacagaaatggacattgagagttcatgctaggcaagcaaaaggtgatacaaacttggaagaaggtggtccaaaagattgtggatcaaagaggcaaggtgatgactgctgtagactatgcctgcggagtcaccaggtaccttgtcatcttcccagctcatgctactttcatctttgatggggagcttctaaaactgggtagagagaagtaggatcctttcttaggacaatgtacacagacctgtcatagacagatttgatgaatccaaatatgcacacatgagtctctgtgaggattttcctcatgttctactcgctctgtggacacttctgcctaactgtgtttcctcactcagatgtgcttcagacacctccatgttacctcccacattctcctagtttgtgtattgatatctaatctgtatgtcccaaacctcaagttactcattttactttcagcaaaaattcatgttagctttaagtgtgatgatgtgaaatgctttgtttcttggtgttatttaagcctttattgacagagaaaacttttcttgacctcttgtaaactgtccatccagttttcttgatatatgttgtatatcttattctttctggcccctgtgtggattcaatttaacatgccaaagtgatggatggcacaatagtgaatgcattggatagttttatgtcaacttgacacaagccagagtcattggagtggagtgagcctcaactgagaaaatgcctccataagatcaggctataagcatgtctatagagcattttcttgattagtgattgatgaaggttcaatacattatgggtagcgccatccttgggctggtggccctgggatttataagaaagcaggccaaacaagtcacaaggagcaagccagtaaatagcacccctccatgttctctgcatcagttcctgctccaggtccctgccctattggagtccctatcctgacttcttttgatgatgaactcatgtgatgttgaagtgtaagctgaataaaccctttcctcctcaagtttctttggtcatggtgtttcatcactgcaataacaaccctaagacagcatgacattcaagaacatggtagacatagctccaaacgagccctgtcagttgctgatctcatacttagatgtgtactgtggtccaaaagtagtgaatgatatttcctgatatattagtgatataagtcccatagaaaataaaatagtgtgtacttttttatatgctatattattttatgtaactaatgatggcctttatcagctcatcttgctgccccaacctgccaagagttcttacttttaaaattgtgtattcacctttatcaaagaactttgtgcctttgagttccttcccattgtccttcagctggccttaaaggactcctcccatgcagcctctatctaagggaagccagctgtagcttgtgtgtttcaggtgtgaatgtgcatctctccaaatccacactgaaacttcaaccccagaaacaatattaggaggcaggacttttagggggtgactggctttgggctctcacagtcaagatggacattgttgcctttaaaacagagctcagagaactgtgttcagtcttcaaggccatctgtgaacaacagcagagtgccctgtcagagaaagcaggcctcatgctaccttacatctcctggcagcttagtcttaaagggaggacatatttttttttttatctctaagactttgaactgacatatttttgttgatcattttgcatatatcaactaactctaagaatcccaggtttctgaagaggggcttgtggtggaggttgttttgaagttgtctttctctctggccaatagataatcatcacatgcctcagggtgtcttggaaatggagcatttttttttacagcatcagagtgtctgttaaggactcccaactatcatttaaatttatctgtgtttaaagtgaaaggaaataaataacttgagtatcgagattatgagatgtataaaagtcaatatcattatagaattttaaggtctaagtcataaggtcaataaaacatctcatattcacttcctaactagtaaatggcattgtccataacccagggaaataaaagcttcctgagtttgtcatgatcattgttgctattacattcattatttgcaagggcaaatgtttcagattgatgctgaatgtctcaaactatctcaagtgttttttgtttctttggcatcactgtttggcaaagttgagaaacccttgggtatggagttgagctggaggtatggggtccatggaaggcatgggggattgccaatgtagttgccttactctcctactgcctatgccatcagttagcacaaccatgtccttacctgtcctctgaaaccctcagccaaagtaaactctgtctcccttaggctgcaccttgccaggtatttggtcacagttgtgggcatagtaactagtacagttcttgggagacagaaagtaagaggaacagctttggctcctgcacagttagactggttccttccttgctgtgacatcacaaagaaccattatgaagaatgataaacactagagcttctaagacactgtctgggtctgggtcttatccttatactgcagacaagttgctggctgttacaaggcagtataaggcttaaactttggctctgaatgcttatgtattattgaccttttggaattagacatatatgatctgttttgataaaaaaaccacagtgagtttgtttcctgattggttgatttcggtttgtgggtgttggtatgtattttaacttactagttttggtttcaaatgtgctttcctttcagtttttgttttattagttcaactttcttttgttaaatatccatttttgacttttacttgtttatttttactttaaaacttctgttagcatgtaactgtggtgagatattgtttatgatttattaaaacttgcctgaggattcagaaagcaaagtcagccacaagccatagaagccaggcacatacctttaatcccagcagccagaagctaggaggtggtggcacacacctttaatcctaggactcaggattaagagatagaaggatatctctgaattcaaggacacccagatgtacacaagattgaatcagtctaaaagagacttagagttcacacctttaatcccaacattagggattatattaggatatatgacaggaacaaggtctcagagaggcttttcgctctccagtcacactgaagataggagttttaattctccagccacactaaggaaagattacagtctgaggcttaacgagagctcgtggagacaggatcagcccattcaacctgaggtaagaagctagttgccagctgcttttgcttttctgacattaagcttgaagcttgaaccccaatatcagtctgtgggtcatttgtttttcatgttacatctaactgtgcaaaatatggaatttcatcgtggcagtctctttgaacatatctatatacttgctctcttatttccatccagttcttccatgtacataacagttcacctattgtcaactgtccctctgccatgcccttaactgacaaaatatacccttcgagtgtcttgagtaacatgacattttattgtagcatcagtgttatggaggaactcccaacctttggatacccataaatatcagcttaaggaaaggaattgaagtattagagatgaaattttttctgttgaaggcaaagttaccacagaattttagggccagggcgaaaggacattgcagcaagctgtgagttccctgtcttgtcaggaccacttctaataaccaagggaagcagggtgcttttggagtctgtctttttctgttactactgttattatcacgacagtccaaatatctctattgcttgaatgcaaaaaaaaaaatcacatgatctgtcatgtgcttgaaagcttagtctttatcgggcagtgctgtttggggaggtaaggaaactcttgggaatggaattgggtcactagaaggaatggggctctgccagagccatgtaaccagacccatctctcacttaccattcctcccatgctgatgccttccccatcctctgaaatcctgagccaaaagaaactctgtctcctttaagttgctttttgccagggatttggtcacagccatgagagaagaattaacacttttctgggagacagcatatgaaaaaaaacatcattacaggtcctaaccagctatgattggtccacttctgctatgacctcacaaggaacaattatggggagtggtagatacccacctatagaaagcatgggccacggctggatcttgatttttaccgcagagaaactgtcagttgactgtacagaggatgggcttattttggttctgatagacttgcatagtagcttttggaattggacattggtgacctgctttgacatcatgaacatggtgagtttgcttcctggtttactggtctggtttatattctgatttgttgtttagctatcatccattttttttctcttaactatttttttgctcaactacctaaatcttttgacattttttttactttggtttgtatatttttatttgaaaatgttgtatatgttatctacaaaaaataaggaatgtcattaaggcactcatattcaccttctctgttacttaccctcagtcttttcatgtagtaaaaattgccttttaagattatcgtccctcctcacaccttactagacctgtcacttttagacatactcttgggtatcttgtcttgagtgacatggtggaacaaccatcctattgatgcccataaatatgagtttaagtaaaaggaattcaataacatgactgagtcaaaggccattgaatcagcctatatgttcactctctcttcaatatccatgtccataccccagggcagacaaaatttagtctgtcctcgttgtcactactgtttttgtttttgttttgaaacatcttgcaactctggttggcctggcattcactatatagaccaggttgtcctggagctcaagagagctccctgcctctgcttcccaagtgctgggacaaaaggtatgtgtaaccatgcttgttccggtactactattcttataagttaaaatgttcttcttatgttttgaatgtgaaaggtctcacaccatctcatgttttgcgatgcttgttctctagcaggtgttgttgtttggggaggtggaaacttagcaggaatatctggagtcactaggaaaatgggaccctcaccatcatataaataactgcttcagatgcatccccgagccaccagctcctccaacaaccacgtcttcccagtcctctgaaatctcctaagtcaaattaaccccttcttctcttgttatttcttgttaagtgtttggtcacagccataggagaaggaatgagtgaagttcttgggggtgaaaagtgagagaaacttctttggtttgtgcccagctggattggtttcttccttgctgtgacatcacaaagaaccattgtgaggagtgatagaaacctgggcatatgtggcactggctggggctgggagtagctgttgttggttggagagcagctggactccagcactggttttgatgaacttgaacctcccaatctttggaaatttgacagtgagtttcacctttttctggctagggtattgatatatgtttgcttgtttcattttacttattcatttaactacttttgctttggagtttgttttcattaattgctatatttttaaacaatgtttttgtttgtctttgtaactttggtttaatttctcttattgtaaaatttgtttctattagctgtacaaaaaatgaggagtttcagtatgacatttccatgcatgtataaaatgaactctgatattatgtttcccagttctgttacatttcaccagccccttgcatgtgtcaaaatgtctccattttacattaaaactccaagccactagccaaacaaaacatatttttatgtaaccgggttattccatataacataagccattttgtctacatataacccagaacatgacaaaatttctttcttccttatggctgagtgtgaaactctcccattgaatctgattatgtacttgttgttaaggaatttgtgaatatgaaattgtcccaggattccttgctgaacccatgttaaacagccaggcgatggtgttgaatgcctttaatcccagtgctgggaggcaggggcaggcagatctctgagtttgctgtcatctttgtctacagagcaagttctgggacagccaggcctacacaaaaaccttgtcttggaaatccaaccaacataaactatgaagcattattattgaaatatgggtgtcaagtattaagtattcttatttaggattttcctgtgcatgttcttagggaatattggcttatacgtttctatttttgttgtgactttatattatattgttttggtactggggtaatattgactctgtagaataagtttacaagtatcctcctctatttcacagaatagttccaggagcattgcatctttttttttcctctttaacagcgggtacaatttatcagtgaatctgttgattctgggatattctttggtagaaaataacttttattacaactttgatcttgctccctatattgatctctttatgtggtttgtaacatcttatttcaatttgggtgttggtcatgagtctagaaatgtacccatttcttttagattgtcaactctctggagtgtaagttttcaaaagatccacttgggagtagtagtacccatttttaatcctagtactcagtagtcagaggcgcgtagaccaccacgatgtctgggccagcctgatacacatagcaagttccaggacagccaaggttatatcgtgagatctcgtgatcctctggttttagttgtgtatgttgaattttctcattcttttatctttaattttattcatttatacattgtcttggttagtttgggtaagaatttaccacttctactcatccattgaaatcagcagtttctttggtctttgttttgttcttgtaatgtgcatctacttccagctcttgcttttattgtactttgtcatctgcggctttgggggtttgggttgttctggtttgtcatgaccttgaagtaccatcattaggttggtacttcctcactatgtaggaagttataggtataaacttccttcttagagctgtttcaatctttttttttttttttagcattgtgtgatggtggtggtatattctttacaagtgaaggaggcacaggaaaaagaagctccttgtttttaaaaataaaacagtgagatatgcagtgtccaggacttttcttgcctgttccttctgtaaaaagggacagcacccaaagttccacattttgcttgaaatggttcctgattactccttaactgcattgtgcttatagcttcagcgagtgaggtggactcatctcaccagtcatttttaaacatgaagtcaaacaatttactcattcaactgaccctgtgttgatagggtgtgtatgttgatagggtcctagacaggctagaaagtgtgaaccaaaataacccttccctgcagtcaagttgaactgtgcagcggtagaatgctgactgacacacttgtcttctgggaggaaggtggtggatggtgtttccatggaattgtaatattccctccaaattgaaccatctctccaggagggaaggggatggttatgggcctctagtaaacataaggtttcatgtctggaaagacaggaacttagaagattacaaaggtccctccttagcagaagaaacaggaataaacaggtgctgggagaagagactgactggcagagctgctgagagagggatgcttgcactgtggagctgctcccaagctgtacagagagaaccaaggttatagcttttgtgagctatcacccatgttggggtgggctgtcaatgatgcagctgatgcttttgaataagtcctacttcttgtaagtagcccatcttcctgttagaaaccccaagaagacctcattggttcatcaggttaaatattagtgtgatcattatgtggatctgccatgggttctttttcataggtgaatagacatgtgctgtgtctccccaggaacagtctgccacacaatacttggtacccaaatgaggggaggagtgactgtatggtcctggctatgggtatcatgacacactagtgaagctgagaagcatgagggtagaatctccatggagagaattcttttataactgttcttgcctctttgtgtgtggtagtacacttctttgctaaggcaatagctgcatggttttggtatgggtagtgagacatacaatagctgagcctgacccattgagcaattgtaagtggagtttttctgtgtcctgacggtcagtcccaaataatcacaagacacaatataaattataaatgctcagccaatagctcagacttattactacctagctcttacaacttaaactgacccatttctataaatctatatattgatgcatggctcgtggctttacctttcctacagcatgtcttcattacatgtcctccccctgtgtttcctggtaattcccgtgatcctgcccttctttgtccatcattctcagtttggctttcccacctaactttatcatgctcagctattggccagtcagcttctttattaaactaataaaagtgacatatattcacacaatgcaaaggactagtccacagggattgtagtgtctgtggggagggaagaaggggagaatccctgtttgtcagtcttcatctatgtggcatgcagacttgatgaatgggatctaccttatgagtgtggagatgcctttaaaatagaggtttagtgaaaaggtttcagtctgaaagtagcaggaaaggtcaagattgccggcaggcagtggcaaaggttgcctggtcaccactgtgtgcagaaagaaatgcatctgaagctgagatggttgtcaagcaggagcgtgtttgtgtatgagaactcactagtgtaaaaatgagaaagggagctatgactaacatctaacctcttctctctgatttagcaaataaattagataagaggataacacagttgtgttccaaaagcaaaagagactatgttaaatctgtgctgaaagcccttcttagaactcaagagcttggaactcatgggaagaattggggagtgagaatgtggtacaagtggaagaagatatccatgggatttgacctttaatagaaaaaaatgggagggggtggtctgatccattgagcagataggacccttaacaatggccagtgtaagaaactatgtaactagagaattcttggcattttaactgatggaattgagggagaattttaaatactaaatgaaagagcctgtcatagccttgctcctgaagctgtggggcatgggagcaggtgggatcagtctgcatcctgtggaagcaaaaaaagaaaaaagaaaaaaaaaagtgaattgtaactaaccatccctccataggacaaaggctgcttcacctgagacaggatgtgttaacagtcagcggtagactggctagttatcttgtactgacttgcctttgttttgttttgtttttctctctgtttgtcaaaggtctgtttcaatctcttctatggagttgtgtctttcttctcacagctttagggattgtctaagttccttgtcagctatttaattcataaacacttcccccatctatgattatcttttcatgttctctatagggtttttggcaaagcagcagttctgagttttaaagttccttttgttgtttcttttatcatttggatatttcatattttaagaaaaccgtgctcatctcagttttctatgtgtttttctaggaaatgtatagaggtatgtcttatatttggtgtgtgggtccatttgaaattaacttttatatataaatcacaaggttgactctattgggatgtaaagaaaaaaacatatgcaaggaatcggttctctaattttgatcaccttgggtccaagtccttgagtaccagagacttataacctcagaggtgcacagctctagaaccaaagaacaaaaagctatgactccaaagtttaaaagtcaaagacaatctaggtgctaaggtcccaggaagtgctgggttttcatggacaaggacttacttgctctaggccctgaaaactagggacttcctctagtcgttccaaatcaggcacacagcccaggtgcttagcttagaggattactgttccaggctttgactgctggtgaaccagcccccagtaactgatgtttcagcttcatgaatttgggggcaagcatcctcatctttaagttttggtggctttccagaagctggagcttgtaacatttcaagccttggctctcgccgcgtttttgcctgaagatttcacaactagcttctgctgtcacagccttccacacaatttctgcttctgtactctggaactcttctgctacctctacttgttgagtgaactgaggtctcaaagtatggagagtcccaggaactgatgaaaatcactctccatctgccttactgatgttggtgtcagggacattggggtggaagcctgctttgtctgcttgttgcacatatttctagttcagcctgccacccatagagatcacaagtattaaaaggccatttgtttgaagcctttatggggacttactgttctgatatcaggaacattagggtggaagcctgcttggtctgtatttctacttccaccctccacccatagtagagaccacaagtattaaagggcagttcaggagaagcctttacaaggacttactgtttcagtgttagtcctgagtacactggatggaagtttcatggactcatcaatggcatctaggtccaccaggcatatatgagctggacagctttgtgtcaacttaacataagctaataccatctgagaaaaggaaacccctattgagaagctgcctccagaagattaggctgtaggcatgcctgcagggcattttcttagtgattgatgtgagaagacccacccattgtgggtggtgccacccataggctagtggttctgggtgttatttgaaaacaggctaagaaaccatgaggaggaagccagaattagcaattgtccatagcctctacatcagttcctgcttccaggttactgtccagtttgagttcttgccttgtcgtccctcagtggactgtgactctcgatatgtaagccaaataaacccccttttccctaagttgcttttggtgatgatatttcatcataataatgggaaccctagttaaggcaatatactaagcctctatttatgactatcacaagcctcaaatgtgtaccaatcataaattttaaatgtgaaatgtgaaccaattgtgagtttttgctgagtcaccaggggaaaaggcttactctctccacagcagtaatagttggaggataggcaggttcatccagaggtaactggggcctgtcataggtgatgtgaagtctcctggagactggagcaagctatctggaacagtgtgtctggagccaaatgtcctgaagcagaagccatggcttgagctgcaataatgttttgcaagtagaatggagtgtccatggaacacctgtgatacattcaaagcttcattgttcccccactcaagggcacaagggaaaggtgtgacaactgtctattgaatgactgagcaattcaaccatgatggcttcggtcatctaaaggggaaaatcatcagagactgcttacataaatgcgtattacaattaacaattatattgttaacaattcttcacccctaatagagtaccatcccatccttctcgaagagtatgacatgcgattctgtttcaccttacttccttttttgatagttctagagattgactccaggaactcaaacatgctaggcaagtgctttaacactaagctgttattagctaaaattcttccagccacttgcttgaaaagactaacatttctctacaatactctttgactgtaggacaccacttgactacatacacgtgggtacatttctggactccagagtctccatattttaaggccagtgagtcctccactgtgttgtttactacagttgtctggtgaagtcttgaagccaaggagtatgcctccaactattgtatttttttcctaagtagtatttacccttatatgtaattagtatttatatatggagttttttaattagcttatcaggtttttttttactgttatgcgacattctgctctgtttaatattcttgaattgttagtttatagatataaagttctgtctcagtgtttttgctagccttactatattgtaaatagtgttttctcttgagtatgagggagaatttttcgtggacagtcttcatgatagagtgaatgtccagttggttagatgttgttggatccatttccagagcagttgagctcattcatactccccatgcagaatacataagataaaatcctgttcattgctgttctttaatttttggcatcaccaaacatcgattttcccactattggaattttgtagatgcaaagcttatagagtgccttttgctaatttgtgcattcattacttactttttgcatttatgcttttactaatataggccatgtcaaatagtatattactttgtagattatagattgaataatctgcaatagaaccttatttctttatagaatcaccctagctgtctctaaatttaagtactttgttatctgtctaacaatcccagttcagtgcccagcaaaggaaaattctagaagctattttatacaatagaagttgattttaagctgtcatttggagcttgttaaagtcctcacattagtctattaataccagaagcatcatgtgtaagcagaaatcgatttgcaaagccaaaggctgctctggtatacatgtggcaacaggatccatttcaaaacatcgcttcctcttgccaaggtcagcacaccaggcctgctatcaccaaagtaaccagagaatgccagagtcctcaggctcaaaacccagcttcttttgcaacattacatttcagcactttttgtccctttctttcttttcaatggcagaaaaccttttcatcattctaaaatgtagttggcttccttgttaggagaattttaaatagagagaacaaaaagctatacaccctctgcccctccctgctccaaaacaacaatttcctcatggtgggggagtttcatgaaagtttggaaaagaggtacagtgtgtcaaaccatgccccccacactgacaataattgtgaagttgaatgctcttagcttggcagctttgacctggagtccaggtgtgggcacagcttcgttacttactcatttaatttaccaagtatatctggtggctagaatttctcacctgtcttaagagtgaactgacactgccctcactatatgtaattaggataaagccctgggttttataagggagaccggaaagtccaggaagaatggaaagaacatagatttaggctgaatgtgacatagaggatcaaaccaattttattttgagcccaaatggacccctttgacccaagtacttcatccttaaatgggaaactaaacagccatgaaattttaatagtgaggaaattagtaccttcttacatttcagactgtgaaatggtaccagggagactcggtggcaggcagtaggcagtgtgtggaggttctagatcaaacttgaaagtttaccccttcaacttttgatcccactctacccagcaagccctgcaccgagacattgggataggacacctccagaatgccacccaaaaaaggtatttcggagtaactgtctgtttgtgaaattctgtgtattatttagaagatgtttttcttccagattttgtttcagcatttttgtcctctcttgtggagcttttcaattctgtttctctgtggtcgaattcctttgtttcttgagaacttgggaagattttagtagtgcttcaatgtcttttcctgtttggttgtccaatttctccactggcaagtggccacatttacatgtcttatgttcaggaagatagggagaaagcaatgtgcaccaagattctgatgaggcaaccaacttaaaggcaggctttgtgcagcacagacctacagatggtcagatcagcatggaggcttcttgtgaaatacctatggtgcttagatttacactgcaacattctgaatgcaatgcagctaaggataggaaacagactaagacagagacagctaagagacatgaaatcacatatggggagtgggtatgatggagacgagaggctgccagtggccatggggtccatctgtattttagagtgttgactagcttccattttgatctgtttgtggcaagatttaagcttcaccaaagacaaactggtagaattttcaagtggcaaaaacctggacatgctatatttgtttttctaataacccacagagtgttgttattagctaattcatttaatcttagaatggagagtgaaggctgagacctcatgtagagataatctgtgaaaaccacccagcctcaggctggtatcttggggaatctgagcagtatgctatttaatatgttcagccattttattaacatccaacatttggagaatcataggcatatcagtgttgaagttacttctttcagaaaagaacacacacacacacacacacacacacacacacacacagtgggaggaagagaaaaggagggggagtatgctaaatctgtcccaggaatctttagaaaaatgttacaaagtcatgtattaacttagcagcatggagttgatttcctagtgacaaaggtaagattcaaatcttaggtaaatttttctaacctggggtcctcaggcttctggtgctatttagcttcttagggtattagagggcttttggttttgtttttattagctctccaatactttaaaatctttgccatggagattcttgggctatctggattgggtcatctccttaacaagtagtattagaatcgataattgtttactcaaatgtggtgctgggtattaaaagcaggagccccacacctgtcaggcaagagatttactactgagttacttacatagtgttagagtgggttgttctggcttactgttaatgttttctattatatttcatttattcatatttctgcacaatctattttaaagtttaataactttaattaagaacgtaatttgctgttgtccaaaatgtataaaatttatagaaaaactgttttaaaatactccagtgaaaagacagaatccctctacagaaagatcagcataaacacttggccattttccaaatgttttatatgataattatgtttagtttacatttaataaaataggcataatgtaagcatcactttggattccatgaatatatagcatatgtaattattatttgccaattaaaaattgaataagtgaagtagatgcaaattaacttaataagcaaatgaaagtggtttcatagacttcagttaggctttggaaggatgacagctttgtctcttttgggtgatggactatcagaacgtcatgatgatatcatctgtaattgagtgcttataacacgccagggtctagacaatgtacagcagtcattcaccctggtggctagatgtgaaactatgacaagcaattacttattacatttctgcctctttccaataagctatgaagtgatatagcatattagttacaagttcctggctcagtatgtggaaaagcacctgtgcctttggacagtcagtggagagatgaagggtggggtccctctcatgcttccaccctagggggaaattaacagcaccaaggtaatctcagacttttcattgtgggcatctttctgacattccatatcctatactttgtcatgtggtgtcccaaccaatgacaggggtggcagaggtcctaaactctggagatccatgttgctatgtgtttggcacttcaatagcaggtgattggttaggcagagatttggttggagttttgggaagaagggcacatttgagggagtttgaagatgttcttgaggtttaaaacatagaaaagtaaaacctgagaaacatctaatgcataaaaatcaatcctcatcttttgtgaggtttaatgtggagaaatgagaaaagggaaggcgccacaaatggccttcaaattccaaatcaactgagtagaatgaaatttcaataaacaaaaccagaacacagcagaaaggggagatttaggggaaatgtgacctgcaaagtgtttctccagggggaagtgagtgtcagacatgggggttggaaagagttattttagtactatcagagattatgaaattatatgaaattagtatagttacataatttaaatggattgagcctacagccgtgtacatattaggaaggcactctgcccccaagtcacactccagccctcatgtggctgcctgagagcagcatataggatgacaagagaagatgagaaacaaacaaacaaaaaaataaaactgcattgcatgatagggagggaaaaagtgggtgtggcttattagaggaacagaaaagatggtggacaagatagttgaaaagatcctgtagacagggaagctcggaagctgggagctgagggaaggcaggggatcagtgaccatcttcaggatgcatcagagaaatctgcaacacagagcaagggtgtgtgtctctgtgtgtgtctctctgtgtgtatgtgtgtgtgtgtaaagggtggcaattctggacagccatttaaaatgtgaccactctttcagttaataaagtgctaattggcaaaggtgcctagaaatttcccaccaaaaaacatcaatgaatccggaaaagtagcaactgttaatggttaaatggttttcaaaaatgagaccatgcttatgcaagccatttgtaaatttcaaagtgatactctaataatagtttcagacaccaatatgttgctatgctattgtttggcataagaatggtttcttaaccatgcaaagataggcctcttttctgcttgaacaaatagaaaaaattatgaatttctggtagtctgatgatgtctttctgtatttaaaggcaaatagatcacattttctacaagagatgttggtgtgtgtgtgtgtgtgtgtgtgttatggttttataaatttccatagaaagttgcttcattaaatagtttatttgaccatttattagctcatttggtaaataactcatttgattttgttatatgttcttggtggtttgaatgagaatggctcccacagtctcgtatgtttgaatgcttgttctccagttgttagaactaactgggaaggattagaagtcatggccttattaaaggaggtgtgatactagagttgggctttgaggtttcaaaaagtcacagcatttccagttatctgtctcacactgccctctctctctgggcatgtgcgtgtgcgtgtgcgtgtgcgtgcgtgcacacgtgtacacctgtcccaatgaactctctcttctataagttgccttggtcatggtgtctcttcacagtaatagagaaatgactaagacaatgctctaggaagaacgtgacatgacaaaataaaaagaattcacagattaaagtgctaagggtagtactcaacaattactggaacaaggtcagtcagaaacagcatgttacaaatgaaagagaatctttgaaaattaataaaaccaagtgtttgtttctaaggtagcctgggatttcaaggttcctctgagttgactcatgaacatgtcttgagcttgacagttaaaggatgctgtcccattaactgataaaatctcgttgcacctcacatttcttgcctcctacttaatgtaggaactttattcccaacaaactgcatacatttcaaaagtacatattgaaagtcttgataaatgtttaagatctccactgttcccaagatactttgtctttggctggcacaagccttcaaagaacaaccacaatgttcctctatactctatcctaggacccaagcaattattagctgatttttttccactattgattagtttgtattatctacaattttacatcaaggagaatagtaaagcatgggttttgcatcaggaatctttaaaacaatatttaaatcactctattggcttgtataaacctactaaatgcacgtaaaaggcaaagtcaaactttagatcagcatgcactctgtgaaagtagtcacaattagtgcactgaaccagggcctacctcttgtctgtagtataatgctcaggacccccctgtattgtctgatgcatttagtcatttgttgattttattgccaagcacaccctaccttgtatttcacacttggtttatccattcacctgttgatgaagataagtagtagagctgttttcaatgtgaggatgaatgaagctctctgaacatttgcctacaactctaggtgaacctgcagatcagaatgctgggtttgtgggattgtttgggtactttttaagtccctgtaaaattactttccaaggtagctgtgacatttgtcttatacatctgccagtagtgtgtgaggtcttgttaatgtagatgctcaccaaagtttggtattgtgaatgaacctaatattagtcttttgagaacgtgtgtggtagagcccccattgtggctttaatttgcattttactaatgactgatatgtttaatatgcttttattatttttcttttaccatcaactgttctgtgccctttattttcttctcttcatttaggctaagtactgcttcttatgtcattcaatctctactgttggtatttcatctatatctgtcatttttccattctaatagatttataaaaatctatttgtcatagtctgtattccaataacaccgttttatatataaagaaattatactatatatgtcacctcttgcatattatttttatatacacttctaaatattttaaattataaaacctgtcattatttttgctttaaacattaattatacatatgtgtgtatatctatatctgtataaatatttattgcttgttttttttttttgtctggtgctggggatcaagccctcaataagtgttctacccccaagctacagctccaaccctaaacatccaattgtgtttgacaatattttgaaaaatgagaaagttttcctatttgtctacatgtttagtgtggtcacagcacacgtgtgggggtgagaggacatttctctctaacttttatgtgagtttccaggatcaaattcaagctcccatatttgatctttttggagcaacaagtgcatttgtcaggtgagccatctcaccaacacccacccccccacccccgtgctggtttctttctattggaacaaattcctccaatgttttggatagtaaaatctgttggccatcattttctcaaccctgaatgcttgaaagtcttcacatcactaattttgggaagcgtgggggatgcagagctcttgctgttagctgctcacagcccctctgtgctttaaacatctatttgagcttctgaagagaagtgatgctattcctggctttccgtgtcattgctgttggatttatttaccgagctctttagttttgatatatagttgctgtcaaatgtaatgcaattagtcaagatctcctcatgttttcgagtccctcttctgagacaaaaattatacagatccatcttggaattactggcatgatcctgagacttgcttttgagttttgttcaggtgagttcagagttcagctaacttgatctgggactccaaacaatgggatgagttctttcctttttcatgtggttctaagctttgtgagttctggaaactgttttgcccagtctctccaatgcatccttctctggctttagtgaaagcatggcccacatgtgtataggctgcagtgctcagccaaagtttgaaaggagttaaggcaaatcattgagtggtggggagctcatctcattctcctttgtcctttcagaggtcacgatttggggttgcccactgagcaagctatgaaaagagatagctcatgtattttgtctggcttcttagatgttagagtggagaattccagttacttcagttgtactcaaagtgaaattccaatactcttttttttttgcttaattatgtgaagattctttttaattattaaagttttaagttacaaaaatatgcaagtgagaatcttttaagaacattttacagtgtgaagaacagtgttctcatggcctacatttttaccaaagatgctgatttcaatagccgaggtcttctgtcgatatctgtaaatattgcgtctacccacatgatatggtacaatgggaaaggtagacatcctgatcatggctgacatcttcataggtgataaagcattaatgtaaactaaaccacagtttttactctagacagtgaaaaaatatccccaagaaattgaattccttaaacttttaccacttaccaaattcttaatatttaagaaatttatagcttatttgggtggatgaggcaaatacataggataagtcgaaaatagcatgccatcatgatgggagcagtgttttggaagaggatagaaggtgaggactaatttcgtaggtgatatagccagcctattactgtctcccctttccaaacccctatttttcctgcttctcagatgaagagtttcaagaagtataatggaatggatcctcagtttttctaaggcatctctcagctgcagagctgaaacagctgctggcaacttgctcttgttttctattaagtgatcacactcctcattgctgtcttgttcatgcatccctgaccagcttgggtagtgggaccagtactataatcataaattgagtctgtacaagctttataccttgagttgctgtgttagtggagtgcaggctggttatgaaccaaatattctataagccagcctaggcatcaaaagataacaggaagtaattcatggaacataaaggcaagaatgaaactgagcccccaggattagctaaagccagaaaacccctagcaaagccagggaaagctctggtgtttgctaatctgcttcatttgttctggatacataagatttcttctcttttgtagtaggcatgataggagggccagatgctaagtgtgtccatagctttcagtttctcagtcatgtaagtatgtgtgtgtatgtttgtgccaagattcaagtcacagaaaatgtcaggatagggtaaaagagtcccataacataggaagctgaataataaaattaagactgttcactaaggtatctcacaccaccagtccctcttgctcatctgtaaaatggccatgatgcctactttatagtccgagatctgatataaaacaagaattcagtgggccctaggttctttcctaattctgttccacctgcttaacttttctttctttgccttagacaatcttctgctaaatttgctcgctctatagagtgcttacagctggggaaatgttctgataaagcagaattattgtatagcttacttaaggcaggaactacattgttgaaaatcagtttctatttactgtaagacctgagtttctctgttttcttgaaccttgaccttccccacccataatcttgacttgtttttgagaatacccttaccctcctttattttccctaatcacatgacttcttttaagattttcttctgtatttccatattgctccattgtatttgttttgtaaacctgctttgcaactactggcgattttacttcttaaaaggggcccaagaaatagatttagtctgctctctttaatctgatttatagctggctagctcttaggtacaccccaataaaaaaatctagcttgcttcaaatttggctcaaaattgtggtagtggtcttattctcaccagtgggattaacatactgtcctgccattttcaagataaggattcgtattttcctccggagccaaggacatgcagatgacatagctggagtgagactgcctgtttgagtgaaagctgtgaagctctgggaggcagcctcgagggttacctttgggacagtacttacagagtgcagtaaaaaacacctagaaaaaaccataacgtgggggtgccctatgggcagcaggagacagctgtgaaggagtcatagcaagagctgctgggagggaggagatttgataggatgtgggcttggactggatattttaagacctgaaaaccaatctgaattattaaagtaaactggatcttcccactgaaaatggtcagagagctatgggatatatctgagagatatatattcacagctggaaaagagactgggatggtttctttgcattttaaataaagtatctgtatgtacttatgtaaagaaccttaagcacagttgttaggggctacactaggctttgattaagcaatgtttcttcctctaagtagaccatctgatcaaagaatctcttatgggtagctcatccatgagcctgcccactctatccaccctttgttctaatcttagctaagatttccatttggccttaattactgattgctgagcattgtcagtcaatttgcattgtaaccttgagaatgactacatgatgccatgagtcattctcttttcccagggcttgtggtctgttagtttatcccccacatcttccttttcttctttcagtggtgggtggtccctgcactgtgtgtattgaacagaccttcctatacctttgatgccactgttctctttggcttaataaagactgggctgaaaatgtatccctaatttgtgggaacatcatggccttttctaagtaataagctaaggttccttgccagcagtcctgactgttttgtttttaaacttcacagccagtattgtgtgcaagttatactcttgactagcccggggcttcacatatggtgatttttcatgaaatagaattctctacttcatatgtatttccctctccttaacttgtattattttcagatcagttgtccagttcttagacatctagattttgagaaagaccaacataataaccatccactatcccaagtctgttttttaaccactaggggaaaacattctgctctaattctggtcctccccaaaaacaatttttaagagccttactaagtgtctgactgtacattagattctgaatagagacgggttgacaatgtgaacctcccactgaatccttggaggaataaatttattctacttcttaatattttcctagctgtatgaacagatagtgttcttaggaaagtatttcttgggccatggtggagatgtttggaagtcctggtcaaaatcctgaagcatccaagatctgtgcttcttgtggcttccccattttatcagaccactgttgttcaggacccactaccatgagctcttggtccttcatctctcatgttagcctgttttcacacaagtttctgtatggaaaatattggcacattatctgtaccccaggactataccaggctttcttttggactaccaaccagctcccaaatcatgacacagagactggttattagttgtgaatgctcaaccttagcttaggttcattacttgctagctcttataatataacctgtttctcttcatctgcattttgcttcgaggctttttacctttcttttcttctgtatatcttactgtcactgcttctcatgtctgtctgtctggcagctgccaggcttctagccccgtgtccctctcctcctcccatgtttctctcttccttcttctctcccaagcctaaatttcaccttctctttattctccctacccaccagccccacttatcctttctgtgcctagctgttggccattcagctctttattagaccaatcaggtgacttagtcaggtaaggtaaaacaaaagtgatacatctatacataattaaccaaatgcagcataaacaagcataacacatttttacatagttaatactccacaacacaggatgtagaattttcttgttgcctactgttgtatttttagccatggttcacgtttgtcagactaatccttctagcatcagtctgtggagtcattctcatcatcctgggattcggtgcttggcattgtaattagttgcctcctagtctctccaaacctgaatgtcacaatttgaacttggtctttgttttcattcatatttggtctgtgcaatttgcttttcattccctgcaagtgcatacatgttccaatctgtaaggcttatttgattgatgcagttgtcatacttcctctttgtctttgagtccttctgggctctattcgggaccaccttctctgtgaggctttcctggatgacctcagtaagacatgattttcttccttctcatacttcatctggcattcaggacctgctgtctacatatcataagggatgcccttatatatgctgtgaatatatgtttatcttattggttgatgaataaagctgtttcagccaatgggcagtcaggatttagccaggcaggaaatccaaacagggatagtgaaaggtagtaggtggagtcagagacatcatgtagctaccaggaaggtaggatgcccgggcattctctggtaagccaagaacatgtggagatacatagattagtaaaagtgggttaataattaaaagacagctagtcaataataagcctgagccattagccaaaaaggttatgattaacattaacaaaccctctgtgtctaggaactcatctttttttccccttagatagtccagcatttttggaatgagtttgtaaactacttcctaatgaccctgaggatatctttagtacctgtggatatctttagtacctgttattatagtccctttttttactttgaattttattaactaggctcttctctctccttgtctgagtttgtcaatcttcctcatggttttagagaaccagctccttgtttgattccatgtttattagtctccattaacttttgtcctcatctttattatttctttcaatgtattgcttttgagttggcattcctttggttttactaagaccttaaagtatgtccagtttctctgattttttaattaattaaaatattttcattatgtatatttgttctatgtagtattatgtcatttggacatttttaatgattgctatttttctgtggtttctcttgacattgatttctagttatattacactatgacttgaaaaaataaattatcttgattcttttatttgctgaaacctaccttatgatcttaaatgttatctactttgaagaaaattccatgggcttctgagaggagtcagatggaattcttgtagtttgatagaaaaaataactaaaaatatcaggaaatacaaatatgactactattggcagtttgatgtaattaaaattgatataatttttaatataataaattaaatttatgatgaaaaaggtcccccttaagagaagcaagcacatttcctttaagtgcacacagaacatttagaaagataaatgatattgtaggccataaaataaatctcataaaattaaaaggattcaaataagaattcaaaaatcctttctctctcctctttcttatcctattccctttgtttttgtttgtttttaaaaggaaggtatattttgactcacattttcaggagctagtccatctcagcagagaagttgcagcaggggcataaagtagctggtcacattacacatgcaattaaatatgggaaagacaaatgacactgcctagctcactttctctttgctattctatctgaacaaattatttgtatgacacaacttaccacagtcactcaagacattttgtatgaaattaaattcatgacgaaaaggtcccataaaaatctcttaaggcctatatacttcattagaatattctaccaaataactgagggagaagtaattatgattatgtaaaaacttttctaggaagtggagaaggtatttccttacctgagatgaatattttaatatcaaaaccagacaaatgcaaatgcattctttaacatatatttatatgttatataaatttgtgtgtgtgtgtgtgtgtgtgtacaggtaaacacacacctaagaaaacttttgggagttgctttttacaccctgttgagggtcagagtctccctcttattttactttttgagattataatcacataatttttaccttccctttcttccctttgagccctcccttataaaaaattgaacattaatgtctacaaataagtcaaaaatagaacttatagtgaatcacaaacaggaattacaaagtaattaggcccaaatttgaaaagaaagtagtataaaacttgagcattgagaactaaaaaatattgctaaaatattaaagatggtagaataaataaatacacccaatttataaataaaagaacaatattaagatatctgtgatttgaatcaattaacaatttcattttctattctgtgatgccttaaaatttgtttgaaaatgcaaaggaccttcaagaggcaaataaactttgaaaagaaaaaacaagtcagaagacatatttaaacagtaatctgtgagaccaacatgacaaagatgggtcacttccaggacagaagagttatgtcaaacaaggtggttaggtactctccaacctgtctgccaggttgtctcaaagcagtggttcacaaacactcactcttagcactagcttgccctggcagcatttgaaataatgcaggtattgggcttgtgcaagaacccctaaacatacactccatagtaagacgctggttcctgtttcagaggctctctgtgtgacagatctgcacattaaacttggaggagagttgccacagctccttcttgctagaaatctgccaggatttggaagatgagaggagtctgtagacagtggcaggcttccttgtctccaaatgaaggaaatgctgatggcctttgtccatgaaacccattagattttactccaaatgttgctgggctgagctgataaataaaaaataagataatctcatgtctagccatgaggacactgatgataattttgcctaatggcgagcaaacagctttaccaaacacaattttttgcttagaactaagtctacaaaaaggacgcttaaaaataatgtaaaagtcgtgaaaagaaacacagggttctaaaccctatagtatatctttaaaagccccacttcatacacacacaatctaagcacacatatattcactatgacattaaagattttatcatgtcacaagacatgataaaaggacagtttgatgcttcagttgcaagatcacttttaaaagccagaggtgaaggtctatggggaatgcctttgagctatgagccagtttcttgggggcatttaagtgcattaggaatttgagtggctctgatgctaacatactgattctagttctaactcaaacatcttgaaaataaacaagattgaatgagtaaactggttaatagtctggtgttcctgtaaacccctcaagccacagaagtgaccaggccattccccaaaggactctaactgccaggttctacccacagaatactcttaactgccctaactgctggacccttcccccatcctatagagtaaaaaggtcaatctatggacatgagatcccaccaatctccaccctggaaagctccaccctggaaagttccatccccttctcaaactttttataacccctctgctcaagcagagacgatagccatccttctcgttttttctctcctaataaatcttgtgtgggatttgctgtgtggtgtgtctttgtggtattccttgactcctggcttccaggataagggtgtggattgtcccaagagtcaatgtaatgtcttctcatgtaaaacaaaggaaggatacgggggataaaaaaagtgcctaggacctgcactgtctttaggtttctacttcttacacacacacacacacacacacacacacacacacacacacacacacacacacccatcatcacctttttgctctcttttctatcattagaaaattaggtttcaatgttagaccattgtccttccttgcaggatgtgatggttacaattatggtctcagtcttctggcatttaatcaaatgaaattgattaccataaatggaaaaagaaaatgtctcataatcataatgcagcatattatgacagagggtccagactttcaaggtttggcagccggtcaagcccctactgagtgctctctacctcacgtctctttttttctgttgacacatagtcatcataatttgtcctctgggtaccagaatactgccaagaaaaggaattctaaggctgtgtgaagaagaacaaaaatctcttcttccagactcccctgactactggatctttgtattgaactgattttgttgttgtactgaaagacctaatggtcactgcctgcttattgatcaacgtctgtagcacaattcttcctctaactgctaaaaggaagaaaaaaatgaacaatgaagccaaccacagactaggtgacataagtttgagtgtggctgcctgtactttcagcatcgattgttatcattagcagacatgtgtgttggaggagctcacagtatcaagagagaatttagtccatttgtcctagtcagtagcctttaataccatctcagaccaaagatgtagcctcaagcatttcgagcaagggaacaaaaccacattccggtatctacctacagggagaggtttttcaaaatcaagtagttaacagaaactaagataagttagctggggcatcttgacctcagtttcctggaatagagttgggtcatttcccatggaactctccatcaaggagaccaaattctagttaaacctgaaatagcctcagcaggaaccttttttactgtcttgctctgtcacattccctactggttctatgaatgtgagtcaaattgttgacccatactgtttatgaggacataggtaatcctaaggactagtagcttaaatgaatttgttctatgtttgatgtagttggccatgcaattgaggatgcagagtcccaccaccactgcaattagaataagaatcagtagtctagacagtaaggtgctcactcatagagaccaagtaaacagagactgatacctattgtctgacctatgcctcctttcttccctttctttgaggcttttctgaccatggcaaggttttccttaattaccactgaatggtttgttggcatacaaacagcaagtttctcttaagctatgcaaagtacaccatgcttcaaaaaaagaggtgggggcatcctcctttggttatataggtgggacttgctctgtgagggagtaaacttgactctccggccaggaaatagaattctgttgattctcaacagtcaaggatgcagggccttggcagttgcactgactgttcatgccatgataggatcttcatcagaattggggcctgtttggccttcattgacattggatcaaggccattattagcctcttctccattgtagacacatacctgggagataacatagaccaatatacatacattggggatcattggctattccaaggaaactggttgctctctagagcagcaccacagaaacagcaatagacagcactgtggtatggccacagcctacactggaaggttacttccatattgtggataggcaggcccatgtgatctatgagcctggggaaattgttcactgtcttgggagtagcattggctaaggtttcagaatggttcactcccctttccattttaggtttgtttttccaaccaacagatctgatagaaacacacagagagacatacagaggcacatatggagatgcatagtaaagacaagcaagggtggccaccatgcattcacatatctgaacagaccagggaagtctgctgacatcccacatcgataccagtacagcatctgtggttatgtctgactccccctcttgtgtccaaaccatatggtgccatctatagaccaaacttacttccacaggtattcagatcagatgacttttgaacctttttgttctttcaggtggcagtgacagtgcctcctaggaacttggcagtaatcagtcagagaggattttccaggggacctccaacatctcaagttgtgcactcactcggagtcttctcctgccactcttcccttctcctgggggtcccaaggtccctaagtgttgggatccagtctttggaaatcttactggggcctctaaaatgttatggggagcccactagagataaccactcagacacaatttatagccaatagaaagtctttattccagttggctaggactgcacacatattcaggacctatgtgtagccttgaaaacttagagctaggggattttaaaagcaaaaatcgcatactggtatcttgcttggcagctgcaggggagggtttatgaagacaagcagtttaacagaagctaagatgagtagttagctagagggggaggtttacacagcaagcagttcaacagaagctgagatttgttatctggagtatcctgaccacgggttcttagaatagagctgagtattttttccataggattctctatcaaagagatcaaatcctagttaaacctgaaatggcctcagcaagaatataagatggaagagcatctgcaatgtatttccctgtcatgatggctttaaaaaatttcatgcacatttccctatgactatgaaggttgttctgtgttttcaattttattttagttttcaattttattttaacttttgtcaccatgtataaaatagggagatggcaatatttgtctcagtgactatgaagaagcatcagtgtccagaaaatggtagtatatgtattggctgcagctggccagtcaacacaagacaggttgtccaagagcaaaggtacaccaatcctgagactgttgtggaccccagacaccctcattgctctaatgtattccctgccctatggtccctcctggccattctttctccatctgctgtgtcagacagatggaggacaggaattaatacagttaactcattaattaatttaagactctgcttttgcattggattgggtctcttggtgatttgggggctcagaatttggtcacaacaattatccctagttctttgattcatctggaaaatgggaaaaataataactaccgaaaagatttgtcagaatacaaaaacctccattagttggcaaagttatgcacattttgaatttcttggttcaagagcacctactgttactgttagacccctggaaaaactcaggtatctggggtcccaggccacgactgtggtcaccccaatcaccaagcatattcgagagcttgctgcaaactacatgtggctttattgtttttttaacgagctaaccccatgttagctggggtctttcacccacccgccatggtggatggctcgcaaaagacagtttgaacctgctgccaagagatctcgtagggcagcgtaaggggagtgtctaggggtatgcataggctcacgattggtgtgcctccaggcttggagggcttgccctgtgttgattggtcaactggttgttatggcccataggctctcccagggtggttgctatgctctgtgcatcattgctgtgtgcttgtccgtaaagtacacccaggttcgtaaagcatagcgccaccagataacttctgattggttccttgtcacgaggcaggcacctaacctctagtgactaagacaaggtcatatcgagcacgtgttactgtcatggctactgaaatggggagctggtcccttcattacaaaaggatatgattaaaagctggtatgtttctcaccctgtgcaaatcaaggcaaagggtatttgatgttttgcccaaaccacacaacttaatcacatttaactagtaaattttgcttctagtaaataatatataagcttataacaaataagcaatattcccattgttgtacccaaattctgaacccccaaatcaccagtagacctattccaatgcgaaagtagagtcttttattgtttaatgagctaaatgtcttaacttgggcccttcgtaagaaggaaccgggggaactgagaggaggggaatttattggggtgtgtaagggggttgtctaggggcacacaacagtctcaggattgtctcccttccaggcttgggtgacctgtcctgtgctgattggtcaactggttgttatggcctataggcccttgaagggtggttgctatgctctgcacggcactgttacaatgcttttaccataaagcacacccagagcctgccagttaacttctgattggttccttgccatgtgaatggtatctgacctagtcatgcaaggtcaggaagctcagccattttgctgagtcaggagccttttgtcttgctggatcttttctgcagcctgtcatggctgctacaggggggcggggctgggtgagagtctggtcccttcaccattagtatgccaatctgttcttctgagaaagatgggagaggtgcttctgactgagtctgagatgctcagtctccattctaacaccgagggtcactcttaagttcactagctgtcccaggtataggtaacatatatgcaacatctcaagcacaggacttcagtcaaattacaaaccaattacaaatcaattagaaggctaatgttcctaagtactgttgagtctgtgaggaagaaattgtgatgggtggatggatggagctctaataaatgtatgaaaacgtagggctcagaattattttttatagtcaatattggctgttgtccccactggatagaaagttctatatagagtgatcttaactttaaacaataaaaatcaggaaaaataaagactcaatctcgtactcactggatttgctttttctatgtctcccaatcttttgatgttatttagaagaaaattaaccaatgtgagcatttcacccttcttggtgttaatagtgttggcagagagagaaggggaatagtacaaattccaaggaaagacattattatctctgtgtctgtcatccttccctctcttactcccccctcccctgtcttagttgcaatccttcctgaaccatcctgactatccctggccccactgcatttggttctctggaagatgctgattaacatttgctaatgtatgctaatgagcattaattaccatctcgatgtgaacaaaagcagtgctacaaaagaaggataaagatgggggagggacatgctcctacctcctccccttgcttctctatgctcaccatcttctgctttcctgcctctcataactcctcagtatttttttgtttccttcggtttattcagtattcctgaaagccatttagcttcaccacttgggatattgcaggcgtgctctggagagcagaaagattttctttttgttctaaataatccaaagatacaagcttagctgctatgggttttatagcacacgtttgcattttcacttggttgttactttggtatcttaataccataaaaggttgtagacacaaaagctcccaaaggaatgattttcatttcaccacacttatttacagggactgccctgtatggaggtaattgcagtgctagagcacaaactctgagtaggtattatgatagcatggttcaacaagaaaagccccctcctcctgtctaaagcaaacaacagaataagactcaccacttactttttgttttatttatttatttatcctatttacttgcaaccacaaagaactctaaatgtcttcataaatagctatttgttgaatatgtgtagtttaaaaggaaaaaaaaaaaaaagccagtgtccaaacacagagtaagaacccgttttagtcttcttgtcaaccactggtatatcatgaagtatctaattgcagattctcacacttacttcagcatgtaattcaccatctgaagaactccacctcagcatttcatctttcttccagtgtaggggtgggaaaattggaagcacaccagctattcagtcagcctaagcttaattataatttattgtgcaataaaagcaaaagggaaaatggcaagaatttgatgtactttctcttcctttccatagataagtgtacacatatggaaataactcatttattcagtaacatgtatgcatcaattcagataaacatataaattcaaatatacataaataatgaattacttccattttaaaggataggaaggggatccatatcttgagtgggttttcttctttgtgttctaagtgttaacaatcctttgtctttaatctcatagtaaaatgtttttccacaggcttcttactgttcaatttaacaactgcaatattttatattgtgtttctaataaggcagacatcagtagctaattattttcttcttctgggcgtcccagagtctcaaaaaaaaaaaaaaaaaaaaaaggcacaatacagttggaagaacactggagcataacagccactatgacagttgtacccctccttacccaaatgctagcttcttattctctttataattttaaagatacagaaattaaaatagctatgcagtactgttaagatgttgtaatattagaaaatgtgagccatttaaaaagcatttttaatgtaaacttttattagggaattttgggggtattttgtttacttgctggtttttcccttccattatggtatttttgaatgtgtgtgcctcgagaaacctgaaatcactcttaaggaagataagatgccggtccatgtagagggagtatcagactagctctgttcaaattatatactttcccagctttgaggatattgaaatataatgatctcactttcattttctacccatgagaattttcgaatgtcttatagttttcaggtttattaagatagtttattggtatgagaatcaaggaattcttctcttcactcaatggcttccaacactgacaggagtaagactaccacgatgagtgcaacaagcatcttctcttgcctaaaatcagcaaaaataaaaggaagtagaggaagaaattgcccagtcattgattttcattcagttttgttgactgaatggtggcatttctcctcttcacatccacagatagtgttagaagaaatgagcagagactgatactttaggctttctgtatggagagtgttaatcctgaaattttcaaaacaaaaaccagttccaaaatctgtagcaagctttaattaaacattggccagaaagatggatcctgaccatccacccctgggttcccagggaatggcatctagtcacattttgcagaagcttaaaaaggcaaaacctgtaattcactgcatttcccatcaggtccaatcaggggcaggcatactctgacatttccggcctatgaacttcctgcctacatgtaatcaagcacatccagggtaggtggttcaaacaagctttttaggggagagaaaacatgtggctgattatttctcaagaactacagtttccagaattccaggaagttaccttgtccttgggcaagtgaggcttaaggttaactttggttcttacaagagatcattcctgaatgtggtttggtgactgacttgaatacataaggttcactgtttagaaatcctactctagagctaaatttatttgtttagaaatttagatttatttatttttgtttaatttttaagaaaaacagaatttcaattgttctttgggtatgcatgcacatgggctctcgagtgaaggggccagctccccattttagcagccataacagctgaacacgggcttgccataatcttgccttggtcacttagaggtcagatgcctgcctcgtggcaaggaaccaatcagaagttagctggtggtactatgctttatggctctgggtgtgcttttcggacaagcgcacagcaatgacgtacagaacatagcaaccaccctgggagggcctatgggccataacaaccagttgaccaatcaatatatggcaaaccctccaagcctggaggcacaccaatcctgagtctatgcatacccctagacactccccttacgctgccctataaagatctgtatgcagcggcttcgaactatctttgctagccatctgacatggtgggtggatcaaagacccgagctaacatggggttagctcgttatactacgcctcatgcaattggcatcgagctttcgcctcaattctgtgattggggtggctgtggtcctgggctaagattctggaagcctgagctttcagggggtcttacacgagtacacacacacacacacacacacacacacacacacacacacacacacacacacacacacacacagaggcatcaactgtgttctctgcatcattttttgcatcatgtcaattttgtaattgtttatgatatgaggggctactggatggctccagatctggaattttcagacattaaatttcccaacttaatgaggattctacaagtttggagagaaaaaaaaacaaaaacaaaaacaaaaaaacagctatctctattggtttcatgatctttttctcttaaatgaagggatctctgaattttgttaagggtcataattcttccttattttactttgcaacacaccatctagtccctgattttcaagttcttgaagcaaagtattggtagtataaacaaatgaaagcaatctgttaacaatttacaaaaatacacatgattaagtatgtggctttagcttagagatgtattattgttataatattagttcatataaataccattggcccacttgatctgtgtctttcacatccctgaatccaagcaacgcagataaactattcagaagaagtatgtacactaccacgatgagtgcaacaagccgccatattgattgactgacttctatattggaaaagccacaggtcaatttccagttcaaattgtggttagctggcagctgtgccatatttctttgattcagatcatttgtcttctgcatctttctttcaccagaaattctgggaaaccaatcagagctaccctgctctcctggcaaaatcaggaccctttcttggggttcttggtctcacaaataaagaaatttaagaatggacacaaaagggagctcaaggacaatgttatagtttataagaagaacctcagggtaggaaagctgtacatctcagcagtttcccagaagaggaaggtgaagaggagtaggagcatggaagccagacacatggaggacaagcagccacatgactgggaaggaaaagaaccagaaacacatgagttctggatagcctcctaaagtaagagaaaggaaacacaaacacaagcaaaccaaaacaacaacaaaaaaaccccaaaccccaataacagcagcagcagcaacaacaaaaatccccaaagcaccagaaacgcatgagttctggatagcctcctaaagtaaggaaaaacaaaacaaaacaaaacaaagcaaaaacagaaacaacaacaacaacaaaaaacaaaacaacaaaaaaccccaataacatcaacaacaaaaccccaggcctttaatgagataaggtatacataccctaatgctgtctctaccagctactgtgagttattagggtatggaattctggtaagaaatgtatctcattaaaggcctgttattcctatctctccagtatgccccaagtctgccttcatatgaatggtcccacctttctgagggatgtccccttttgctaagtcattgatctgacaaccttgaattttaggtcttcacccaggccataaatttcattttcttgatcagagagaaatggatgtctttcaatgggcccttattggtactgtgaccttcccttccccgaagatgttgccctgaaataatttaggagtcatgagagcactcggacatcaacattcctgaccttcagccaggataggcccaataacattttcagtaaacagtcgagacacgaatggaggtccctgttcctaaactatttctacctcccgtctcagaactatttttctttgcatttcactactatatgttctttaatttcttagtgttcttacctggtcttaagtctttaaagatttccaagctaataatttaaagttcatatttccagcctactctttcttctcaacttcaggctgaaatattcaaccgcctatttaatgcaagcttgaatgtcttaaaggcatctcatgtataaaccccatctcaaagaaaattgttaaaaaggcattctcccctttatataaaataagaaaatgccttaaatcaagggaactctttaagactttactcattcctaccccagaacatttgttctgtatatctttgtggatatataaccccaagttgaaaaaaatagaattttcactttccaaaataataatctggtgcaacactatctctttaacagctgaatttggtcagagaataaacaatattgaatttttcctcccactttggttactgacaccctgaaatacaaagaatgactttcagaaccgcagattaaataaagctccagacaacatccgcttttgtgaataactccagtgcttctgaattatgacattttgctgttgtttccatttatggttttttaattactgactttatttgcatgaaatgaggatctgggttgcctaggagttcatctgttcctactgcatattcttctcttaaataggcatgctctaatgtagtttctcttgtcgctgccaacattttgacagagcttgctgtcttctctccttttactgtcttcacatcacccccagagagaaaggttattttaaaagaagaccaagagagtttccaaagtagccagtgaatgagggggtcgtaggattgggaataagttatagggggatgctaagtaaaagaatggcagcagtgtttctgaatggttgtgtgtgaaaggcagaacaatcctttacacagggtgtgacttaggtttcttagcttgcttcttcagcattgttttcagtggaaccgaatacagagtagtattgatggatactctaaaaaatcctatgcagttccattaaaatcaagcttgatctacaaatttggatagtcttaaatcttgatttagtttttgatgctgatgatgccttagttgagtatttgggtcaagaaaaagatcagtgattacattaatgactataaaaatggtcttgtcagaaaaaggaattctagatcaaagatagtacaagaggtgatcacacacagaccagcccactcaggagaagggtgtagttgtatttgaaagaatcatggcatctcctaggaatcacaactctctttttagttccttacttgacatcacagggatacttaggtttactggatggccaattaaaactaccctttttgtaccagggaagatgatccttgactccagctttgctctctatcccaaccccacctggtgttagagaaaccccattttttttctgatgatgtttttgtttagcttttggcctttcctaaaggttgaactatatttttgaagtttctcctgtcttgttttttttttttttaaccatcaaattacattccaacatcttgatcattataaatcagtacaacatattactcattttaaaaagcagctgctttggataagttagtgtactggctagttttatgtcagcttgacccaaaataaggaattatctgaaaggagagaacctcagctgagaaaatgcctccctaagatccagctgtgggacatctcttaattaatgattggtgagtgaggattcagtccattgagggcagtatcatccctggactggtggccctaggttctaaaacagcggttcgcatccttcctaatgctgtgaccctttagttgatatggtgactcacaccataaaattattttgttgctgcttcataagtatgattttgctattgctatgaatagtaatgtaaatatctggtatgcaggatatgtaatatgtgacccccaaaggggttgcaaccaacaggttgagaaccactattctataagaaatcaggctgaaccagtcataatgagcaagccagtaagcagcacacttccatggcctctgtatcaactcctgcctccaggttcctgccatgtgtgacttcctgtgctcactgcttttgatgatgaactgttataccagagtttctcaactttctaatgcacctatcctttaatacagctcctcctgttgtggtaccatgaccataaattatttttcttgctacttcatagctgtaattttgctactgttacgaattataatgtaaacatctgtgttttctgatggtgtctggggagtcttgaccaacaggctgagaatcactgcgttatatggaagcactggccaaataaatctttctctccaagttgcttttggtcatggagtttcttaatagtaatgtaatccacactaaaatggtaggagaatggcctgtgggttgacatttgctattgtcctcagctgtttccatattctgcactttgacaggaccttgctccgagagcaattatacaccatcaaaatgtgttttcaggagattctttgactaaagaagcttggaggtagcattaattgcaaataatgaacatgacctcttacagatcacagttttctcagacttgcctggcttcattattacacagtctctgtagtgatataaaaattctgctagcaacagaaggcatgtgtccaccttgaacaaaaggacgtttatttccacagcccaaggctgatgttgatagataacatttttgcatatcttaaatttttatggagacaatatttaaaagcaaaaaggactttcacaataaaatgctttgtgaatgaaatttacatctctggcatgtgctgcctttttgatatgtctgtcaggaaaaagaacctcttgtttttgagacagagtctcactaggtagccttagccggcctagagttccctatgtagagctggctgacttcaaacccactgagatcagcctctctgcctccagaatgctgggattaaagatcttacatttgacagaaaaatcagagacttaactagaagccgtgtcacccattcatactaatattgtttgccatcatggcatttttagatttaagccaccttaaatatgacaagtttctagattttggttttgtgttattctttgattttgcttttgtgcttataggtggtatgtctgtgtatgcctgtgtgtgtatgtgtgtttctatgcgtgaatgcacacaagtgtataagcatgtgtagacttggagttgacattgggtgtcttcctcaattgctccacacttattggggcagagtttctccctggagcctgaactcaaggattctggttagtataactagccagctagccagtgtgcccagggcctaagacccccctgtctctgcctccagagtgctgggactacaggaagctgacacacttgcatggcttttctgtgtgttctggggtcctacctccagtccttaaacttctgcagcaagtgcttgatccactgagcctctttctagccccttgctcttagttcctataagacagattacagagttctacctctggcacatagtaatgcctgcagttaccaattcagctttaacacgggatattattatccaccaaatcccacactttgattccaccaaatcccacactttccctatattattgtactactaaaactttttataaaaccattatatttccttataaaaatgattcatggatgacataaaaatattacatgattttgggtatggaataaacagaaatcttgaatgttaaagtcacaggttcccatatatatatatatatatatatatatatatatatatatatatgttcatattctaggacatttaggctgcactgatataaggcagtaactgaaatagggaagatccaactttggttatgtctgtacaggaagttttttgatacttggaaaaataggttggattgaattattccccattttagagtagtaaatttggttacagttatgttaagaaacaggaggctgttacacccacaagaggcctagctgtgtagacaatgacaccttagcttgctatggattttttgagacagggtttcctatgtagcccagactggccttgaactcatggtcttcctgcctcactctcccaagtgctatgattctgtgtttttggttttgtagttgtgtcagtttgtgcccagagagaatctgagaaacattaaatggtaaacagcagtaatctggggtactttgcaggagtggtattgggttaccaagttctaacttggtattttataataaaatatatgtattttataatacttgaattttacaatggtttttaaaagtcatatattttgtaatatttggatttctgtattatataatcagaaaagcactaggtttccaaaatagaaaaaaagttttgaaatatttactctttactgaaatatttactctttactttatgtgtatgaaggttttatgtgtatgtgggtttgtgtaacatttgtgtgtctggtgtctttggaggccagaagaggatatcaggtcctttggaactgaaatgacaagacagttgtaagctgccatgtgggtgctggaaattgaatcttgggccttctgtaagaacaaaaagtgctcttaatggccaagccatctctccagctctagattttcttgttttttttttttccttgcaaaaaggctttatgatagaaatgattgcactacaggcagttactgatagtcatacaggcattgaagtaatttctgttcatgtctcctttcttcaacagtgcaaatccaagtggaggagaaagaagacgacacagaggaaagctcaagtaagcaagggtgggctccgtgggaagagtttcctgaggactgtaggggatgcggctgccatcttgtctcctaaaccatcacataaaactacaggcatgtgtgggcgtgctttctgctggtctcattgaccagctaatagaaccctcactctaggttctattcagctggtgggtatacaacctgcttgtacacataaacacatgtacacatgaatgcacacacatagacacaaacacaacttgtaacttgtttgtcatgaaaaaattaatgtttaatattttattttctatttctgttttattttctctgggaaagccttgactgatgacaaagtggattggtttcatactgggtttgatgacacatgggacatagcactttggaggcagaggcaggtatatctttgtgtgttaaaggctagcatggactatgtagttcattcctggccactctgtctcacacacatacacacacgcacgcacgcacaacacagagtctcctgtctgctgtttgcacatgtccaaagtgaattgtatactaggatatttgggctgaccagatgaatcaactaaaacaaaggaatgtgtctgtcttggtaccccatttctagataatgtgtatgaactgctatgatgttctcactttggctaggctcagatcaagggcatgaatcaggttccattccaggcacccaggccattcatgggcaggaatgttaggaagataattatatgagcaaatgtttgaatttttttaaaccaaaaatgaaagaaaagcatctgaaaaggggttcattttgagggacaccggggctggcaatccaatacctacacacggtaaacaacatggtactgttgttactgggtatctataaggattggttccaggattccaaagagacccccaagtctgtggatgcacaaacaccttccataaaatgtcatatttgttgcctgtgtataaccttatggtattttaaataatctctaagtttctgtatcacatataggatgatgtaaacactctggacatttaatgatgaggagaaaatgtgcacattcagtaaagacagtttttctaaatatttttaacccatggttagttgaggctatagatatgaaatgtaagaatatgaacaacagcctggtggtggtggcacacacctttaattcaaatattcaggaagtcccagatgcaggtggttctctgtgagttcgaggccagtatggtttgcagagcaagttccaggacagctagggttatccaataaaaccctgtctggaaaaacaaaacaaaaaggaatatgaacaacagactatgtgttaaattgcacagtaggtccctaggacttattgttttggaagttgcaattttatgtctataaaaacaggcccttcctggctcttccttggctctgccagctacaattctattatttactacttagcctgaataatttaggcatctcttctaagtaatcatgcagtttttgtctttctctgtgttgtttatgtccctggacatagcatcttcagtgttcatacacactatatgataccaccgtattccctgaattttaccgtctgaatacccattacacaaacacagctacattaactttctctgttgatggatgtttatgctgtatctatatcttggttgttgtgaatagtgaatagtgcttcattgactatgaagtgataacacttctacaagatctcagctcagttcttttgggttaatgcctacaattggcattgctgaagccccagatacctttatttcctgttttgaagaattccatgttttccatggtggttgtattatcttaccttcccatcagtattgcatgtggtttttaattgcttcacatcgttgccatcacttactatatttttgataatttatcctaacaagagtgaactaatatctcactgcagttttgattttcacttctctaacgattaaagatgtaattcacaccttcctatgtctgttggaaattttgaatatcctctttagcgagatccttatttaaaggcctttacttatttaaaaacatagaccattaccattattttatcatattatttaatcataggggtaccttatgtatcctggatgttaattacttctcagatacatggcttgcaagcatttattttattctgcaggtttttttttttttaaaaaaaaactgaattatttctttcgttgcataaaagcttttcctttgatggggtcctatggctaaacacaatgattcttttcttggtgagtgcaaagcagataaacatgacccaatggtagaggaatggagacaggtttaccatctgcagcagtgacaggggcactgagattattccataagcagtgtcttcttcacagcctgaggctctgaagtactgagcttaaacctattggtgtaagacagctccttaggggtggtatatctggatcaccttcagtttctgatagacatctgatagatgctcagtttatggttgtaattcaaagaggaaaaatagtcaacacattcttgggcatgattagctcaaagttgtggtcataggccaacaatatttccagtcatatttagcaagcatactgaagatggttggcataaatacttcttggtatactaaagtacttttgtccaagatggctttacctgaaaccatatcaggtattgtgacttcataggaaaaggagatacagaagtagtattaatgtagaaatttgcccttaaggccatcttcctctcttggcccctaactgtaccactattttttcttttattgcttgtactttgaatgttatgtacaagaaaacattactgaaatcaattttataaagcctttccagcatagatttttgaaattttaaatgcatcttacgttcaagtctaatacattctgaatttgtattttctgtagtgtaaactagagggttaagtctcttgtttacagagctatctagctcttgtagtgccacttgtttatgacctcattttgtattctttggtatatttttgagtattacttgattgtacatactcatgtttacttttgagctctctgttcccttctattgtgctacatggatgttctctatattaataacattttgcttttttattactggatatttatattttgaagtcaggtattgtggcacagtttcattattctttttagaattttattcattcttttctaatttcacacatatgcaatgtgttttttgtttttgtttttttgagacagggtttctctgtattgcttttgagcctgtcctggaactcgctctgtagaccaggctggcctcgaactcacagagatttgcctgcctctgcctcccagttgatcatagtctccccattatttttggctattctcttccctctctcaatgaaatcctttctcttccaattgacatctaccccctattttgatgtcatttttgtttgtgatctgcggcatataattggagttcctgcatgttcaacagttgggggtcatttacttgatcaagggcaaattactagcagctacatcactgagatgcatcagtatctttcttccaacaagtaactgtttacagctccttagtgaggggtagggccttatgaatcctctcccccaggcatgccagaatgttcaggtcctgtgcagacagcactgctgctgtgagctcataggtacagtggtcaggttgtgtcgaggcataagcttttcacagcacttcttcacatgctctgactcctgcgttccttctatccctctcatctacagtgttccatgaccctcaaagggactaatatagatgtcctgcttgtcctgctgagcaatcaaaaatcagttattcttagaactttaactacttaaagaatctcagcattgcctactgctgactataaaaacaaacaaaacccagaaaagtaaaagtttccttgaccaaagttagagcagtttaatccatggataccaacataaatatatttagaagcagtttgacaacatgtctgtttagcaaaataatagtaataggtccccatcccttcagggcctaacacctcccagccatgggcttttgatcaggtatatggtatgaggcatgaaatccctcctgtggaagagatctcaaatccaatcaggaaatagttggttacatctataatggtaatgccattattgtgcccctgtatgcatcttgcccggcagttttgtattatagcttgcaggattcccaattgtgctaattttaatcaagaatgattttcctaatttgggccttttgtgatttcatatgaacttttgtaatttcttttctattgaaaaaaattaatatggggactgtaattgagttttcattgactatgggcatttttataatgttaactatttcaagacacagataatatagaagtctttctacttgttgtgtcatctttaactttcttcatcagcattttaaaaaattcccagtgcataaaaagtcttgcatttcctcagtaaagtgtattcaaagatgctttgttccttttcaggctcttctaaatataattgtcttattaatttcccttttaggtccttaacttttagtgtaaaaacatacaactgaattttttacatcaattttgtaaattctgtgatttttactaaattcatttatttattctaacagatatttgtataattttgaggttttccaaatgtaagattgtcttctgtaaactgatagtttacttttgttcagttgagatcctttgccttcttattttgttttttctacctgatggttctactaagggcttttaaatactatgctgaaagagtttgcttctttggcttactcccaatttctgagtgaaagctttgatttttttttcacactgttattcatactagtagtgtttacatatgaccttttaatggtgagtcaattcttattttgtaaaatcttctacatgaaactttacatgtccagttttgttaagtgctttccttcatctattaatgtgatctttgttcttcacgttgtcaagatagcaatgtcatatcatttaaattttgtatactgaaccatctatattgcattgctaaatcctactgggttacgttgtacagtcttttcactatgttgctacattggactcaactaatgttttattgtgaaaatttgaagctatactcattagaaataatttcctttagtctcttgggtatgacagttgtgtgggtctcatgaaatgagttaatgttccttcctcctcttaaatctcaaagagagtcataaaacttgcaccattattggaaagcccacatagacccatcagacagagctcttacttaaagactctggaatttaccagtgaatccagtaaatagagacattatgtatttttaagggatgcattttaagggatacaattccagaaaagtaagaaagaattctatggagtcaacaatgaaaatgaggtgtggtacctgtagtcccaggtacttgggagacaaaagcaggacattcaattgaacccagtagtttgtgccagccttatcaaattaagcagactcctataatgaatactaaactacttacacaaggttggataatttcatctaggaagacactaagtatttaatcattttctctaaaactgttttggcttgtagacatttccctgtgtgtctggtctctatcctaggaaaactagtaataaatacacagtgcctcctaattttacattacatgttacatggtggtagcctttaaacttgagcctgatttgaatggttttagaaatcacaatacattgctaaatccaagtcaatggtttatcttaataaacaaagactggaactgtaaggattaattgcaatggagagccccatttctgcatgtttgaatagatgaaccacagaacaaattaagttaggtgtgtgtgtgtgtgtgtgtgtgtgtgtgtgtgtgtgtgtgtgtgtgtgtgtgtttggatatgtaaagtaatatttcatcttacattgtttggaacttatagttgcagtcactggtttgtggacagttattaaaaagcaagaataagctttttagtgagagaaaacaggcacttggtgatgcttcttactgacacatcaacaactgtggtcaggtgaagaagaagataagctacctagaagagaaagcttgagaccaaagaggaaacggaccagagatgtcatcaatgaggatgatccagaacctgagccagaggatgaagaaaccaggaaggcaagagaaaaagaaaggcggaggagactgaggagaggagcgtaagttatttctcctgtatagctggtggcattattatgtaaaaacacatgaaagaagattgttctaggtggggactcactgaactttgatcagtcattaaaattacttcctgtatgacactcttaatctgattctgccattttacttcacttagatctatttaaatagtaaaatatagtttttaaactgaatacacactgaaaatggactatgaggaaatccccatgtgaaaaacttaatttgttacaggcttttgcaatattatggctgttttaaatatttgaaaattacagtaacaaattgtatacagtgtaacccacaatatatggaaaactccagaagaatgagctccagtcactttatctaatggagaagtattttgtaaaatacaactaaacctagtacaagagctatgaacaactttttacagttttatagggttattaatgaagtgagtacaagacagagctgtatgtagtattcaaagcctaaaatgttaactgctaggaattttatagaaagaaagtgtgctactgacttctgtcatagaaggttgaggacacacacacacacacacacacacacacacacacacacacacacacacacacacacacacacgtgtaatttgtttgttcttgttttgaagacagggtttcactatgtaagccttggctggcctagaattcactgtgtaaactgggctggcctctgaaatactaagattaagggtgtgagccaccacactcagctcatatttatattttttaaaaatcagcatcttttagctccaagcttctgacactgaagagagtagtgtgtttaaatgctatttttaaaagatccaagaagattatttttttggattactgaaaatttgcagatggcaaagagggaaggaaagtgtgcctgcctacatctaatcatggaaaacctagactcttcaaaaaggattcaagccaagagccaacctgttctaggcttgaaggttagggggctttgtggcctaccaccaggcagtgagattcattactcttatactcattgaagtatgttctcaccttgtcctcccaagacgatgcctttcagtattccataactctattatattatcccaagaaataatgattatttgatgtagctgtgtggaaaatttgtcaggtaggggaacaaagatttgcattgagagactatacttctttttagaaatattttagcttcaattttgactttcccttctacttttatttctttttccttcttcaataccaagatatcatttgttttagattttaacttatttcgatttgcattttttaacaagcatttaaaaatattaaagtgtaatccacctccaagtcccatgtaatgttatgattattggtgctattatacagcagtatgccctgttagcaaagcttgttctttctaggaaggatttaatcaagaaaacttcaccaatgcacatatgtgtgccacaagttccataatagaatttgcttttcctcctcatttatccctgaggaagagaatcttcctaagatgatggatagaataggagtctttctgcttacctggcccagttagggctttcatataaaattcccagcctctgggaaatgggtccatgcccatcaattggatcttcttctatgatagtatctcatctcagttggtctcacttccattttggttctgagaatcctgtagtcactcccatctcacaaaccttttacagagctaactttagtctctaccaaatgttcaaattatattgtcaaaaccattgtgctatgtatatttaacgttgacattctgactaatattttagggtctatttttctattgttttctttatagataagaatcttttgaaatgtattttgaggaaaattagtaggcaaatgaggacacattggcgtaagtgaattaattcataatcttctttaaatgctcaagcaaagccttgaggagtctcccttaccctcacaaacatttaaaatcaggtgaatttaaggctataatgctatctttggtgatggctaagacatattgccttgttagacactgtagagtatttctagtgatatcacaggcttttcctgacccacttttaagcaagtaagaaaatgttcatagtagtaaaaattcattatgttatgccttttttcccctcacaactgttggtaagcttaagatagaaagtctttcttgcacagagcagttctgaattttagaaggtggaacatatgtctatatacatatatatatatatatatatatatatatatatattcacatatatatatatatatgaagagatctttctttgggtggttcctagataagtggtttctttgtgattaagatgagtgttgtattatagttgcttgagtatttgaagataacttatctgtcagccacactttgaagaagagcaggatcctcttgggagttacgaacaattaacaagcaagtctttaaaaatacacaagtctcgggtcacttactgtaggagcatacatcttcctgtgtcataagaaccttgtagagcatgtcccaggacactttgattcaattgctgggttcagggtgagaactcaatattattcaggaaaatttgagacataagagtttcttcaataaatatttatacagactcccagatttatagtacagtaggggagaagccacccagacacaaattattgtgaaataagataggatatacatgcatagaaaaaatatgatcgaagtatttggaggctaagagaagtgaaagtttctggaaaatcaggactatataggcagtaggttagtgtcagaaaagactctgttagatgatctcttatatttagcatgtaaatttataagcattaagaccattcatacttgattggctcattcttttatccttactgagactgtcttacatacgattcatggaggaacttaataatgtagtatattatagtacttaatgtacacagtggttattcttggaatagtgggtcaattaaaggcttgaaatatcatataaccaatttactaatcttaaagatctcttatggtaaattgactattattgagagtttcatgcatctagttccttttgctagctttctttatttctaaaagaaacatgttttatgatttgggttcatttctatagctacatggaaacaagttcaattattttgttaaaacctatctaacctgtctaagactaaccaacccaacctgtatattgcttcaagttgtctcaagtattttatgccattgttatacagtatcacaggatttggtataataaataccaacgattaaaaaagaaataacccaatgacaatctgaattgcatcttagcgaggctccttacatagttttcttgagccaagattgccattttcagctttctgttgccgtgccaaaacattgaccgaaaacaacttgccgaggaaaagggatccaatgtttctcaatgttcctaaagctataatgctttaatacagttcctcatgttgtggtgactcccaaccataaaattatttttgttgctacttcatgactgtaattttgatgctattttgaatcataatgtagatatctgatatgcaggctatctgacatgaaaccctgtgaaagggtcatttgaccatcaaaggggtcgccacccacatgttgatgaaccactggtttaagcttccactttaccatctattattaagggaagtcagggcaggaagtcaagcaagagcaaaggtagggaccatggaggaaagctgtttattgacttgctccccctgtctcgctgatgaagctaccttttttttttttttacaggcaaggcccatctgccaaggctcatcattctccacagtagtctgggccttcctgcatcaactaggaatcaaggaaatttctaacagtcaattcctcaactgaggttccctcttcttaagtgtgttgagttgacaagcaagtttacccccaaaacaaacaccacttgaaggcgttattcttctgggggtaatattaagttttatttgaggaatgaaggtattattagaaactatatattgacaacaagtagtcgattacaaagtcattttccagcctgatctgcaatttgcaaatgtgtcttcctacattatgattaatcatttaaaaatagctttcccccatatacctattgtgtccagtaagaagctcagtgaactataaaatatgttttcaacagtaatgaatagtttccaatctctttttcagtatggctctagtgagaagagagacttcaaccacgaattgaatactgagaattttgtattcaagttgttaggggttacaaataaaagacttattaacttggtctttggtaaaggcaagcaagggaagtgaaatgtgatggcaacaactgtctaaggcagctaacagtcatgagctggaaccctgggaagtattaaaggaaaacatgacatgttgtggaactctgaagcctgaatcgccagagagggctgatgatgcacagaaaagatgaagttaattctgctcctgttgggagagatgacagactagactcacctccagctatgggagggccattcagctcctggagtcaagtgttaggaggcaaatggaagtagacaggaatccccaggaaaagatgaaggaaggtacttagggattcctacagtctgaacataaagctgagtctgcttacaaagcaaaaatgtgacttacaagggtcccagtctcagcaccataatattaactacaaaagggtgtatttaaaattgagacactagcttaataattaaaacattctattgcgaacaatttgatttctataatttagtattatgctaccccactcaaaacacgtggctcatgtttagattttgttttctttagcttccagttttgcaacagtaggatcacagaaaagagactttggcatctacttagtgagaagccaaattcctttgaaggcgtcttcaaagcatttgcctgcactgaaagcatttcaagctgaattttatcaaatgaagttttgggtgtaattaacagattaggcttcctctgagaagcagagtttcattttttccctgtttcaatttttccccttttctcgtgagacagggctaatttaaaatttctaaggacacttcaaagacatcttcacctttaatttattatccttattgaaaaataaggttcttaaatgaaacatagaattggggaggatagctgccaaggggaacagaggagagaagtgtgtatcttgatagatctgtaactatcctttccacagcttcctcgttctgacagctggaggctgaggacataaaagaacacttcccttttgagcattagcatgcaaatagcattgttgaaggttataataatccccaaactggatggatgacagtgctgggatgtgaattctagagcttaggggattcctcattgactttgggcagctgaatttgagaagagggctggcatatccgacaggagcctttttaggtttggaaatgaagcaaaagtttaaccttgcattttcttttaaagggaagaagaagaagaaattgatgaagaggaattagaacggctgaaggcacagttagatgagaatagacaaatgattgctactgtcaagtgcaaaccttggaaaatggagaagaaaattgaagttctcaagtaggttgctactttttacacacagaaacatacgtctcagaaatctgattatctatgtattatagaccatgctatagtcgcatgtatgcatatgccagagagctttgggattaacgattataaactgaaaacaattttgaacaacattagcatgtaggtaggctcttcgggtggtcaccttaaatcatctgctccttacattggggttacttagttactatttctctacaaaacagtgtttgaacttcacaggtttatatggttgcttgctttggtttctctgtagcactccaaattctagagaacctttccatcacgactctcatgaaagcacagacaggctgctgagctgccacagcagtacatagggttcagtagaggcttatgccaccatctagtccttgtcccatgggagttaccccttttcactctcatgtagactgctgatgttagggcaaatacaccctgcacgtagctttctacactccgaaaaatcaagcaagcatctctttctggggtcaggataggagagatagcattgtttcccttctgtgaccttgggagaggcaagctttacaaaggaacacagctgtattgatacctatgttagtatcttttgattttgccactggtgtttttttccatgagatggttgtatatatggtggtgagtttcaaaagctatctttcttcctccccgtttcaccaatgacactgtcaagtggtaggatcatctaatgtcactggtaatgatgaaggagctctcaagactgttctcttctagacccaactctgctagagtcactgtgttatttgagggaattattttagtttttaacttcctgagagctcagttactttattaaaagaaataaaaccaccttttgattttggatttggctgtcctttacagagtttgtgtctgcttttaccttatggattgaagttttctaaactccaaacaatattatctctggtgtcaagcaccgttccattctctcaatctctctctctctctctctctctctctctctctctctctctctctctgtgtgtgtgtgtgtgtgtgtgtgtgtgtgtgtgtgtgtgtgtgtgtgcatatggtccatgcacctgtttgggtatcaaaatgatgaaacttaatttgatgaaatgatagtggggtatcaaaatgatgaaacttaatttgatgaaatgatagtgctgttgacataagtgttgaagtatccttatttggcaacttagaggtctcttctgactcctgaaatatattttgagacataaaaagctcatgaaacctggatacccaactatatataaaagtttaagtattagaaaataatgtcatgaactttcagaaaataaaactgaggaggaacatacgaaaatccatcaatgtaatccaccatataaacagactgaggaaaaaaaatcacatgatcatctcactaggtgccaaaaaagcctttgacaaaatccaacatcccttcatgataaaggtcctggagaaatcagggataacaagaacatacctcaacataataaaagcaatatacagcaagccaacagccaacatcaaattaaatggagagaaactcaatgcaattcctctaaaatcaggtacaagacaaggctgtccactgtctccatacctcttcaatattgtccttgaagttctagctagagcaataagacaacaaaaggacatcaagggaatacaaatctgaaaggaagatgtcaaactctcactatttgcagatgatatgatagtctacataagtgaccggaaaaactcaaccagggaactcctacagttgataaacatctttagcaaagtggcaggatacaagattaactcaaaaaaatctgtagccctactatatacacattggtggagaaagaaatcagataagcatcaacctttacaattgccacaaacaacataaaataccttggagtaacactaaccaaaaaagtgaaagacctgtatcataagaattttgagtctcgaaaaaacgaaattaaagaagataccagaaaatggaaagatctcccatgctcttggataggcaggatcaacatagtaaaaatggcaatcttgccgaaagcaatctacagattcaatgcaaaccccatcaaaatcccaacacatttcttcactgaccttgaaagaacaattctcaactttatatggagaaacaaaagacccaggatagccaaaacaaccctgtacaatagaggaacttctggaggcatcaacatccctaactttaagctcaattacagagctatagtcctgaaaacagcttgatattggcacaaaaatagacaggtagaccaatggaatagacttgaaaactctgaaattaacccacacacctatgaccacctgatttttgacaaataatccaaatatatatgctggaacaaagagaacatcttcaacaaatggtgctggcataactggatgcaaacatgtagaagactacagatagacccaagcctttcgccctgcacaaaacttaagtcaaaatggatcacagacctcaacataaacccagacacactgaacctactagaagataaagtgggaaatacccttgaattaatcagtacaattatgttcacttcctgaacataacaccagcagcacagacagtgagatcaacaattaataaatgggacctcctgaaactgagaagcttctgtaaggcaaaggacatagtcagcaagacaaaacgacagcccacagactgggaaaatatattcaccaaccccacatctgacagagggctgatctccaaaatatacaaagaactcaagaagctattctcaaaaacaccaaacaacccaattaaaaaatggggtacagaactaaatagacaattctcaatagaggaatctaaaatggctgaaagtgttcaacatccttagccatcagggaaattcaaatcacaacaactctgagataccatcttacacctgtcagaatggctaaaatcaaaaataccaatgacagtttatgctggagaggatgcagagaaagaggagcactccttcactgctggtgggaatgccaacttgtacagccactttggaaatcagtatggcgactcctcaagaaaatgggaatgagtctaccacaagatccagcaattccactcctaggcatatacccaaaagaagcacattcatataacaaggacatctgttcaaccatgttcatagcattatttgtaatagccagaaactggaagcagcctagatgcccctaaactgaagaatggatatagaaaatgtggtacatttacacaatggagtactactcggcagaaaaaaaacaatggaatcttgaaattttcaggaaaatggatggaactctaagaaaccattctgagcgaggtaacccaatcacaaaaagacaaacatgatatgtactcactcatatgtggacctgctttatgatacatagtagtgaccatgctttatcagagctgtttttaatgatgttgctcagaatggtttccttccagatgatgattgagaagctaatttaaaaaaaaaaaaaatggtgccaagtaccacaagagtaacagaactgtgctgtttttctgggattttgttttttactttttttttaaatggagagtgctggatgtctctacaattttgttcaaatgactgcagaacctggaaaagctgttgctgctattgatgcataacatactgatattattggtcttttatataatatatatatatatatatatatatatatataatttgaatttttggaaactttagctgtgctgtcaactttggaaaaaagtatcccagtttaccgtgttgagttggcattgtacaaaaattaacagccatattgatctagaaatgttgaacttaatttttttccatttgtacaagggtaatgcactgtattaaatatgtaaggtcttaaaaaaaaaataagggattttgagagcccatcccatgtgaagggatgctctcttgacctggacacatggggaagggcctaggcctggcccaggatgatgtggtagactttggggagccccttttgagggccttaccctgcctggggagtggaggggggatggctaggggcaggtgggatgttgggggggaggggagggagagggagaagggattgacatctgaagcaatcttgttcctaatttaaactaataaaataaaataaaacaatttaaaaaactgagaaggtatgacaaggagcagcctggagctatagaaaaaaccttttactgtaactgcccccacccccacgtctttacctttaattcccatgtaggacagtagagtagatacaggcttgtttgaatctcttgccttcagtttattggctgtaccaaactgaaggagatgttgagtctttctgacccactgcttctcatgaaattatatttataggatgatatgctgtagaaagcatgagagatagcacaaatcaacacacagcaggaatcttggaaacaccttggagagcagactccatgcctcatgacctgtggtataataaaacagaaggaagagttggggcctgataagtctagttaggaggaaacctagttacaggaggacccagaaggtgtggaggatggtgaccattggtaatatataaaccaattacccagatttcaaagtgttaacaaaaggaaatagagggtaactcgacagtttggcaaaatctggccagaccactctgatctccagaaacatgcctgtgatagagtcttgtagatttcagagaatggcaccttgggctggactctaggcattagcggcctcttgaaatcatggagaaataggaatcagaatgaaaagaagggcaaaatcagtcacagcaccactacatgccttgaactgagaacatgaagtgaatttagaatataggattttctgtttggccctcgtggtttaatttcttttcctttttaaaaattattatgtttttatcacaaccaattgtacactagcaaaattagccatgttagtcattttttccctataatagtacttttcttttatgtctacctttcaagtacaggagattttgcattaaaaatgtgtatttcctatagacaagtagaaaatgggacaccacagttttacttgaaaataacactaggcttaagcaagaattgtcctctgtgagtacattattcactctaagttcccaaatagtcttcatcacattttatttttccctgcttgactggcccttctaggcgttcagatttgcagcctcccaccaggccagatagggaacctgctgtgcacattactaagacagcaatttagagtgacaaagtcaaagtcagccatcatcacagagaaaaaaactggctgctcacctgtcggcaatgcgcactgtcttctgatgatgttgcaaggcaggaacacttgactctagcgttcagactccctgactccacgcaccactggtgcctgggattgtggctgccctgattttcctgtgggaagaagatgttaatgttacatttgtcttcctctgcaggccttggagctgtgtgagcttcttccacacagatcccaatcacactgtcacagtcagtgctcactgcctcatagaacatgttcaggaaggttctactgccccagcaacgctgggtcaagggagtcagaacagtttcccttctgcttttgtctctttcggactgtgctggctattttctgtcagcttgacacaagataagagtcatctgagaggagaggtccttaattgagaaaatgtgttcttaggattggacttcagaaaagactgtagggcattttcttaattagtgattattgtgggagtcttgggatctataagaaagcaagctgatcaaaccatggagagcaagccagtaatcaacactcctccatggcctctgcatcaacacctgcctccaggttcctcctgtttgagttcctgtcctgaatttcttcaatgatgaagagtgctatggaagtgtaagccaaataaacgccttcttccccaagttactttgggtcatggtgtttcatcacatctgtggtaactctatttaagacatagaaaaatctacttggaaagaatattttcaggattgtttttcccagaatagccttaagactttgttcttactaagtctgtggaaccaagaccataggctcatcattattggaccagatgttttgtcccaagcttaggtctatatgagattctaagacttccctttttgctctggattccaaaatgcataaaatttctaaaagtgataatagacagggtcaaggttttttaacttgccaagagaaaagtctaaggaatggtggcttatggttctgagggtgttgggatttattcagtagtcatcccaaatctttgtttttattgtaattataattatgtcattccccgttccgtttatttccttctttcaaattcatggcctctgttttcattgttgttgttggtggtggtgtgtgtgtgtgtgtatgtgtgtgtgtgtgtgtgtgtgtgtttgtgtatttcctaaatacatgaatacaatttgatccatttatataatgttccttgtgtgtgtattttcagggctgaacttttaaagaccatttcccactaggaatataagcatcttcagggctcccagtcaaaagatagtaatggaactaggaacataactcagtggcagagcatgtaccttctgtatatgaggctcttggttcaaatgccagtattgcaaaattgggtgagggggaaagatggttaagcagttactatgtaggtaggaagctttggaaatggttgtgtctccaagggaacactccagcaggctcaggagtgggtgcttggcatgttcaaagcagtgagtttgattccatagagctgaaaggaactcttttacttcattctctccacccatgcacagttgtgcttctcattatatgttctttgtatgaattcagtttagaatgtatagcctttattcaaacacatgcagatttctgcatagatggcccaagatagaagtctttatgtcttactctaaagagcacaaagacaagaacggaatctagagtcactgtgttcaactctgagaagcaggaactatcattaagtacatcactctggatagtttacgaaatgcttgtgaatgtgtgtgcagggaaaaggggaaagtgtctatttttcttttcttttctttttttgtttttggtttttcaagacagggtttctctgtgtagctttggatcctatcctggcactcgctctggagaccaggctggcctctaactcacagagatccgcctgcctctgcctcccaagtgcttcgattaaaggcgtgggccaccaacgcccggcgatcatttttcttttatctgaaagtcaaggctaatttaaattacttatctataaaatttccaccaatttgaatattgagtatattccatattctagttactcgtaagttttgcactaggtcttcctgccagtaaaaggcagccacactcaccaggggtgaaataacacagctgggtagaaaataactggcatgcttcttactcaccagaaaccaaaaccttgactataacacagcattataactaaagctaattgagcaaccacattattttgctgctagaatgtagccttaacacaaataaacacacaaacaaaacccccaagggactggactttgatctaaagccacctccaacttcatcaatttacaaaaccaagagggtggattatggtccatacttctcaaattgctgtccttagaggtcaagtggtttggcagttccaggcaaggaagacctgaggtaagagggaggacaccatgtgattactagccagctacctcgagaagagatctatgttgtgcttactgtatacagtgcttgcatacaaagcacacactggagaatgagtgtttccatggaggttaaaacaggaaacattacaaaatggattccatagggtgctttaaaatgcttattttagggatggaacagttctaacttttcacgaatccacaaatgactgtgtatgagttcttcaggtttcctttttcatggaattggctcatggtaaaacatcagctaaagtgatatattttagataacaactaacttagatattttactgaagaatttctaatctttgtagaaccctgacccagtgtttccacaatctttccatttggtctggctgtatctgtgatttattagttgagaaaaagaagccaagtaaggtacccttagcatttcattcaaataggaacaggaactggaaaatataagccatgaaactaataatcctacctgctcagtcttgctcacctaacctacttcattggcttctaatgaatatttttgctttagttgtggagtgaggaagttaacatatttctaggaaagcaagatagactacacttgggtttctgggctgagctctcagtctgcttcctttcttaggacttgttcattgtaagcaatctgtcacgggatactgagtacacatattttcttcattggaaagaaatgaaagatttcataaatgaggactttaatagcatgtgtacacacccaagcacacacacttcatcacactggttatagtgatacacagcatttgtttcctgtttttcccagcatcaagtgcagagatggcacttacctctccaagaacagggaaacagtacatctgaacgttgtccttcaaaatgttactttgatatccaatttctctatgatttcacacattcctaccaagtgggaaacagtagtttctaaaacaatctttgaggtttttttttttttttctgtgcatagagatgaatgtaaccctacttcaggaagtcactaggaagaactcaaaatagtgcttgaaccaggcaaggtggcacgtatctgcagtcctcactggaaaagtagaggccagcctggattacatgaacccaactaaaaaagcaaagcatacaacaaataacaaacacacatacaagctatgagaactgccttcatatgttctataaatttaggatgcattgtactctcatgttcgttcaattctagaaagtcttatttctttgttaatttctgtcttgattgatttttcatgcagtagtgagttttgttttgtatgaatttgtaaactttctgttgtttctattcttgttaatatctagttttaatatgtgctgatcagacagaatgcatcttattatttcaattttcttgtatctgtcgagacttcctttgggtttacgtatatggccaattttggaaaaacttctctgaggtgctgagaagaaggtatattcttttgtgtttgtgtgaaatattctgtaaatatctattaggttcattttgtttataatgtcagttagctccaacatttctctgctcagtttttgtctggatgacctgtctattggtgtctcctactatcagtgtgtgaggctcaatatgtgatttaggttgtagcagtagtagtaggtgtgtgtgtgtgtgtgtgtgtgtgtgtgtgtgtgtgtgtgtgtgtgtgtgtgtgtgtgtatgcacatgcgcatgtgcatgtgcacacacatgcacacacatgttttttttttttaacaagcttgggtgcccttgtgttttgtgcatagattttaagaatttcacttaaaatcttcctcttgttggattttttcctttgatatgtatgtaatgtccttccctatgtcttctgattagtttagttttgaagtttattttgttacatattaaaatgattaaaatggtacaatcagctcattccttaggtccatttcttgggatttttttttaatcatcctattacctggaataatctatccttgattttaaggtgtatttcttggatgcaacagatcctgtgttctcatccattccattagtctgtgtctttttattagagaatagagaccattggtgttgagagatattattgagcattgttgattcctattattttattgttatagtttatgcatgtgtgtatatttaatctctttatattttctcatctgggattatttattcctcatgttttcttgggtgtggttaacctctttaggttcatttaatacctccataaatgctttcatttagtattctagaatttttctcttgaattacttttttgtggggaatttttctttctcccgttggcttagatttctctctttttcattctttataaaaatcaaagaagaaacatttcattgagagaaattagttctggactgatattagaaatctcttatttatattagtgatcacttgtatcaactgacagcctcttctctgtcttgtcagaatgtgtctttccaatcaaccagtactagtatgggcctcacaaactatagctaagcaagaaaaatatacttgttaacttcctgtcttaggatttatcccattgatagataattcacctgtgaaaacttaccaatttcttcttagtactattggtgtaattaattgagtgtctaacaagttgctgtggttcattttactaattctcatcaaatattttgaaattcttatttagaggttattaaaaggaataataacaacaaattctgatcctctttccccttgagacttaaatgttttgtaaaattttctttgctaaggtgagctttgaaatgcatgatcaatagatgtttgtctgtctccaagaaccttccatatctccactgcaccatttgaccatagaatattctaggtgttcttgtccttgctttggatggaaaggattctcaagtggcccaaaagctactactcctgtttctttggggaaatggtgcagttgattgctgcttttgttcctgctttgaaatctcatgaatgtgtactagttaaatcagccaaaacttctttcccagtggacaatggaaagatatgagttacggaaaaatgactctgctagtgttcaagaatatttcccaaaattgttggtagtaaattttattcaataattgacccacttacttatgcaaagttaaaaagacgtttattgctttgtccatagtttaaaaagaaatatgaacttcaaagaagcagggttttatgcagcatcatttaatggtaataaataataaatgttctggataagaatgtcctgaagttttcttctagatgcataaaagtatggttactgtcctgtgtttttactattaaggatggtatctagggactgtgcatgctaagcatatgttctaccactgaactatacttgcattcatcataattgcaactcagcattgcctatttcctacagccttatctgtcagtgtatgaaaacacccactgaatcagttttctcagtgttcaagagctccccaccttacaacaagtttttgataaaactcaaataactggacttacactctccagcagtttagctgaaagtaacagctagtttttgcaacatatttttagactataaatataatgttgatttgaaaggtgataaaacaggatgcattcgttaacactgaagattatctaggaatgactttgaatatatttgatctaatacagtagaataaagcaaatgtggtctgataagcacaaatgcaaataattagaaaaatgagtgtttgctgttttggggaaatcttatactaacctcaggtaaggcatgtattgtggatataatcaagtttataaaaagagaacaactaagggcttttataaggctatctttggggcatttatgaagaaacagcaagtggcatactatttcaggagtgtttaaaaatgtttgttactggatgataaattgtatgctttagtaagatatacatactgaaatatatgtttggagaacattattagagaatcattaagttgagatgagagtaagaaatgggaatacactgaacattcccaatattacatgtttaagacttgctcctttagttacaagaattagaaaattttaaataagacaaatcactgctttcaaatagttatattgatagtgtcacaatatatacgcataggtttacatatatactttgatatgttattatataaagcattcacatagtcactgtgatattcacatgaagatttatgactcatattgattgatttttatatttttgcaaacagtgttattgtatttcatgacaagcacttggttgtaaggatagtttaaatgggatgccacgaaagaacacaatgaaatactaagattccaagtcaattcatcagaaggaccagcccatgtaggatctgtgaactccgtggatgaccttatccaagaactgattctagtgtagaggatggtactccattctgaatttgtcacgttgtgaacaatcagattcaccaggtagtcctgattacttgtagaatggactggactaccataattttgaaaatatcattttaaattgcctgcccactcatgaaccaaactacagaacacatagttctaacagttaatggaaagttctgtcagaacattttagacccaatagtcccaggtatcagtgcacaatttggaaaaagaaaatgctaactcttacaaatgttttaaaaaataatcataggaacacgtaggtattgtggtgaagcattttgccagtccttccagtagagtgtttcctagtcacagcagcatcctgagaattcttttgtctaaccctatttggaattcatgaaaaaaaatgcttaattagaaaacacatgcctgaatcagaataagtaaattctctttttcaagtcatgtacatgatcttatagagagttgagtgttaatataagcattctaatcaaagattatagatgtgtgtcactcatggaaatatgatccttgttagacaagtcctgcagaccaatgcctagaatgccttttgcttcctacacaaattctaccagcttcatactttctaattcagttattatctacagtgtctactgtatgggccacaattttaaagcctccattgttcttgcccctgtactattattgcaaacattttataggcctatatctcatttttgttagtatagtttaagatacagaaagaatctccatgtttaaaaaaaacttttcaaacacttaacgcactgtagaaatgagggataaataaaagagaaaatgaaacaatgatagaaataaaataaagggctggagagatgaccctgctgttaagagcactggctactctgctagaaggtgtgagttcaatttccagcattgaatacctcataactgcactgaatgctgcatacacacacacacagagagagagagagagagagagagagagagagagagagaggagagagagagagagagagagagagagagagagagagagagagaataaatgtcttgactagaacttgggtggatctttatagttatgaaagcattgtgatggctaaagttatgttttaagtttaaattactgtgcttaagagatctataaaacaatgactctaacctgtaagccccacttggtcaatcacagataacttcctggaatactggaggctgttgttcatggaagataacaagccatgattttgcttttgtgaacaagcttggttgtcacaactactcaagatgtgcttgatcacatgtgggcagaatttacgtcaggatgtatgcttgccccaaatggacaaaggtgggaagtacaaatccttcttcgatttttcttctataagcccctgtctaatgtaactcagagccatactctgggaatcctgggtatggacctggcctgtgcccatcatcgtggccagtagttaataaagcttgcttcaaactcagctcagatattgtggtagtgctctcattcttgttcagtgggatgaacagtatctgtgtccgtgttgcatacgtgatgctgggagtacattttttccactgtgaagcaaagtctttgctgatgagagcagtttactgccttcatcttgagaatttcagattttaagatgcatttgtagcattaaggtcacattctcatccaattttacttctgtttaaacaccagatccatgatagctggctgaggaatatccagatgcttcaggggctgatccagtactccacagccccatactccctaaccttcaggatgtaatgctgttttcctgatcctcaagggactcattaagacaaaaggcctgaaaagtggtggccaatagacataaaaccttcttatatcattcaggaaaaatatatagtgagaagttcatgaaatcgccactataggatttttcatactaaatgccaacaatttgacatgtattgtactgtagagacagaagaaaatagcccgtacttttccttctattgttaggtttgtgggcttggactctgtaagtgaaacaaaaaacattagcatgagaaaaacaaattttattgctatgggcattgagcttgcacagactaccactgagtgatgagtaactcaaggaatgattccagtctgtaattacttagaatcttaaccaccggacacatgtctagagaagtcggggctaggataaaggacttgactacagggtggcaaactggaaatcaacctctatgacaatcctatggaagatacagttcagatagtaaaattcacagatgactctgagctgataaaaggtagggaatgggggaaaacacatttagctatctcccttgcttcttgcccaataaggacccagaaaacttacatttttgcttcagctcaaaattgtccttatgatctatttctggcacattttataatacttttgcataatatggcacacatttaagtgacatattttgggacattgtattctgttatctttccgttccttctgctgacaatagtacaatcttgacagtttttggtgttttcctaaagagggatgccagtcaatatttgaaactcaaaatagtctcttagctccaggggaagaatgagtattgttgtggtctctgctactgtaatacaaagaattatttggatgatataaattgaatcttaattagggacagagtggcattaggaagacttgtgcaggcagaaaacttttctaatatttaaaatattaaacacatatcccactttgtttttattgcttcatttcgcctctaattgctctgagatgcttggtggaccttcatggtacaactaaaacttacattttattttgacacttaagccagttctgaaaatcaaaattggtttagggagtcaacatcttagtttgcttcttcttactgtgataaacaccatgatcaaaagtaactggggggcaggtatttctattacaacttccaggtcacagttcattactgaaggaagtcagggcaggacctcaaggcatctggaggcaggaactgaaacagaaactatggatggatgctgcttactggcttgttcttaaaggcttgctcaggctgctttcttatacaacccatggttggcactgcccacagtgggatagggccttccacaggccagtctgatggcatttttttaactgaggtttttctctttctagatgaccctaaagtgtgtccaattggcagagaactaagcatactcggagaatggttatagtagctttgaatctgataaaagtctggtcactctatgctttgtttggaacacatttccatgagttttattagtgttagaggagaaattactttaaaacccttttgtatgcagatgttgctgtaattccttcccctaggggagtcataagcagtgtcttccttctccctaaggttccaatgacaaactggagaacaatttcactaaaggtcactctgaggaactaatgagtttattggatttcctcacagagcataggtgagaggttacttacaggggtgtgggtgctccttccccccaaaacaacacatctggaaagccttcgccagcacgaataaaggttttcctgtacttcctgtagttacctaggtagagctccctgcccttcctatgtccaagctctatctcctctctgcttcccccaagccccaagactatattcaattaggacaggattatgtaacagctggttgtgagcagtggcagtgaaggaaccagcttcccttttggcagccataacagccgaacatgtgcttgccataaacctgccttggtcacttagaggtcagatgcctgtctcgtgacaaggaaccttagtcactagaaagtcacctgtctcgtgacaaggagccaatcggaagttagctggtggcgctatgctttacgtccctgggtgtgctttacggacaagcgcacagcaatgacgtagagagcatagcaaccaccctgggagggcctatgggccataacaaccagttgaccaatcaacacagggcaagccctccaagcctggaagcacaccaatcgtgagcctgtgtgtacccctagacactccccttacgctgccctctaagatcttttgggagaccctaggagccgtcttttctagccatccgccatggcgggtgggtgaaagaccccagctaacatggggttagctcgttaaattacaataaagcctcgtgcagtttgcagcaagctctcgaatccgcctggtgattggggtgaccgggaacgtggcctgggacctgaaaacttgagttttcgggggtctaacagcaggataccttagtaaggtatggtttgttcaagccctcccccatcctgtcccttgcacccctccgagggaagatcaataggtccagctgaagatggcagcctgactaggaggatagtcctgtgctgtggaaagctgctcaaattgttgctaaaaaaagttttagggatcatggttctactggagaataggggcttttctttggggttcttagtttcatttatctaaggatttaaaaatgaactaagaaggatgattgaggggaatatttttagagtgtcagagaaaaagcaaagatggatgatatgtgaaggccagcagctgttgggggagagagacaggagaggaagagagtcatgccccttggcttagggtaggagagatcagagaaccatatatggctgagggaggacgggaaggacagggagcttcagagaatgagagacagcatattaaggcctttgatcaacatccaaaaaataaataaataaataaataaataaataaataaataaataaataaaagttacaggcgtgggtcggagttcagagggcatagaattccagactcctgactccagggacaaagtctgcaccagagaaccagggttataagtagaaacagagacagagagacagttcattaaaaagagaatgaaatcctgagaacaggagtaccctagtaagctgaggtaaaaagtcttcaagcaaaggatgacctctcacctctgctatttgcataacatgtgggattttgtggtgcaggctctgagctttatctgagacccaacctgcaccgagcatgtgccatttcttatgatgcctgcgtcggtatggtttctcatatttctctgccattcttttatatgcctatctttaaaacaaacaaaaaacttgttgttgttgagaatgagagaaaaacaacaacaataacaacaacaacaacaacaaaaaaaaaacagacacaggtgttcaggtgcccattgaagccagaagaggtcatgggatgccggaaatggagttaaaggctaacaaggcaaatggaactagaactccagctgtctgcatggcaaaaacctgctttgctcttgaatgcagtttccaaccccttgttgtctagtctccagtctctactctttcatctttcaccatgatagtctgaaacacacatattttaaatgtgaaatgggttttatctaatagtatataccaaaataagccatctacataagtttagacactatatgtgtttctttccatttttccttcatgctatcggatggtcaattaaattgtctcaagaggtatgagagagtgagcccgggatatgaaaataaatttattcacaaagactcagaatagacagggtactgctttcccaagggcacagcaaaacaattacatatatacagaagcttttcagatcaactttctgaaaaccgtgttgctgactggcttgctctccacggcttgctcagcctgctttcttgtagaacccaggagcactagcccaggggcgacactacctctactgtatgaaaacctgttaaatatagtctcagccaaagatatgtgattcaataccagatattgcctctaacttgcacatctgaattgtttgggacaccaaaaacacactgatctgcatctcatccctagagaatgtgacttatgggatttagggtgcaaagacaggcctgggaactgttaaagagcctacagtgatgccaaggtgccagcatccagaaaccacagctctactggcatccagtgctctcacccacgataatttattcaattagaagtgttgaatttatttaattagaagtgtggtattaagtactaggacattggaatgaaagtcagctctgttagtaaagtgttgttaaccaaagttactattttattgccttgggaactatgaaaaccctccaaagtgtccctattgtcatttccattttgtagaggatgctattgatcacctcactatctttgttaatgtcattagaatcccctttaaaaaaagcacatggattgactcattacctctagtattaggataatttaaatcatatgtatatatagttatatttatatatatttataagtaatacatgtgttatcgagtaagtctatggtctttattttctagcttggtgcaggaaagcaacttcttctgtaattctgttttaattactcagcaatattttagaaaagtctgaattttatagatgatttggctaattagttttgaaatgttagtacttattatcaaaataccttccatccttctgtttccttcactgggaagtattcaagatcaaaatttttgattacactcagcctaagcacatgttttgaaatgtctctcgtttatttgagcaagaaattgattgcttcatcaggccatcaaactggaaacaagagaaaagtcaacttaacctaacccaaagggaccatgtttcagggatgagaatgtgtcaaaggcagaatagcatgtcctgacttctctgtgtactcagggctgtatcatatactgtaggtaaattatctattttgtaagtcaggccaaagtgtgctctttcaggttaactgtgaaagcattcttgaaagcccatgaaaccttattattctaattactatcacaagaggttgttaaatgaataatgagggcaggtattattgtcattaaatagaccatactcaattatttatcctcagatctgaggttaccacccagagtacagtatacactgtaccagggctctgaggctcagagactgaattacagtcttggtagatagcatttattagaaggaattgaggagtttggcacacacatgtcttttcagtcagacatttgggtggtttacaatcagtagatattcaaagtttacttgtgaagtacagtttcattttaaccatatagtaaaaattctttaaataatccaaaaaaaaaaaaaaccatacacaggtaggaaagtgggttcacaataggaaaaaagataaagatttttggctttctaatgagaattttctctgcattctggtatctatgcaggcaccttactctgagggacactttgactccatatctgtgcattttccttttataccttgtatctaactgcacagtgcaagatgttgttttggttaggaaatctgatcagggaggacatgattggtggatacttgttttcttcaccctgaagttgaactagttcatgacaaaagtcatccataaaaataatgttagggaaagttgtcccactgtgtccctcatctgtacactctgatcatgtgccctcttctgaacctgtaagtaacaatgatgcttctttttaccatgcaggcattagactcaaggggaaggcaaataagctcttccttgtaaatagttattcatatctcactctgtggcttttggctctgttttaaagctaccctcaacatttctgataaattacagctaacagctattttggccattaggagctagagggtaactaggttgctgttctgagatctttttgttctcatggtgtgtgtgtgtgtgtgtgtgtgtgtgtgtgtgtgtgtgtgtgtgtattagagaacagagaatgaacagtgcattgggagaaaaaggaactcatgctagattatgtgatgtccagtggtctggacttttctgaagactagataggatatacatggtaagagttgagtagcatagtgtctgtacaagttactcttcctttggtatgataaaatatcctggcagaaactactgatagaataaaggatttattttagcttatggttccagaaggacagagcatattatgctggggaagccatggcaacaggcaggaaaagtatgagagcaagaacaggaaactgacttatcacatcttcatctacacatagaaaacagagaaacaggatgtttagtagggctataaagcctcacagccttccctcggtatcagacttcctccactaaggctacaccttccaaaggttctataaccttaccaagcagcactaccagatagggaccaagtgcttaagtgcaggagacatttcccattcaaagtaccacagatggttatagaaagatgaacttagtactgtacttggtgttagtactcaggcctctgtactggcctgtccttgagtttctgacagatatgtgtaacaataactctttctgccagctgcctgagttctgcccgccacattggggcaccaaataccacacagagacttatactaggtacaatgctgctggccaatgactaggatatcttacttcctatctcagtcttaagtatcaaccataactactaatctatatattttataagaatttatcttatcggacgccagcggcaggcatcttctcttgccaggatcacatggcagctccacagaggagagaagagaaggaagagagcaatttcctgcttgcccctgcttatattctgagtctgccagctatgtcacttcctgcctggatcacaaggcttctctttactacatttcccagaattctcctccactcctagtcccacctatcttgttcacctattggccaatcatgctttattcagcaaccaagaagataaacaaacacagaaggacctcctccatcagttatgccctcagttgcatccactaagaatacctcctgtgcacattcactatgttctcttcacctccccctctttctctccctccctcttctcttctgcctctcttgtccccagaggcctgtttcccttctccgccattcccattcactttcccccaataaaaacccctcctcccaagctctgtcataaggcatctttctcacctgcactgctttttcaaattacaacacttagggtcaaaaaaactatcagtaactaatgaaagaagcaataaaaacttcctaatattcaaagaaaaatgtaattttagtaactaataaaatctttattaatgtcaacaaatatggttccatattgttagatgaattttgtaattattataatttggctgtaatattgacttccctctgtcttaagttttactgaattactgttcatcaattcataaaattagcataattatctgctttcccaattaaaaaccttggcccaaatagagagtagaatagctactttcttatacttctaaatgcttagataaaaaatacatgttttctaatgggcaattcatgtagaaacagggtgaacagcatgtgattcataataaatttgaagtatttacagtgctggacatgtgttctttatagttcagagaattatgtgtgatagctgaactttttggttctgaatgaagcagtttaagcagccaacaggcaaaagtaaatgaacaaatagtagcagagagaaacagcagaaagataagcaacacccagcagagaagatgagagcagtctgatagacagcacaccaagatgacatcatcaatttagggtcttacaaacatccaacagaaatagatgggggaagctgaagagattaggtagcattccaaactgagctgtctctccatggatggactcttggcttcccttcccacagaagacattttcatagtacagataaacaaaatctctcttagaaagttaaccttttagttgttccccagaattcactgtttttaatgccctttactcattttttttcttttgtcactgttgtttgtttttccattacagaggcaggggcaagtcaattctagaactggcacaagggttttggaggagataaggaagggcaaccttgcttccaaagttccctttcaacaagctttaacagaacaggacagtttaccaataagtacagtatgcttataaagtggtgattttgttacatctgagtaacaaattctgattttagtatccataatgttttattctttatgtatttactataataaacaattgtataactcctatataaatttgtttttttagatatagaaattcttgatgccaagtaattggattgtagtcagttttgccgtaatacaagatatcagttcccccaaaagctcactgcagtatatgaacttgaacaatgaataccatagatggaacacagttattcagaaacatttctggtgatacattaaaaaaaataaaagaaacaaaatttgagcaaaatggcattaccattcaacacaagttaacggttaagaaatacatgagtaagagtcgggcgttggtggcaggagtagtcagatctctgtgagtttgagaccagcctgttctacagagcaagtgccaggataggcttcaaacctacacagggaaatcctgtcttgaaaaatcaaagaaacaaaaacaaaacaaaacatgagtgtgacagtgcatatgacaggaccctttgagaagcacttgaaacttgcttatggaagtggcttttgaaatgattgctgctttcgagttgtgaagtgtgtgtgtgtgtgtggggggggtcaccttgaccctgagtgggtgtgacttttctagtactggcaagtgaggcagtgagatgtgctgtgtgcattctgggtatttcccatgcttcttggcaatgataaacatcaattcctatatttatctagtgtttttcatcaatacagttatagacaagcaaggccaaaattagtgttttgttcacgtcagtccatggaatatcaatcatgttagaacaaatttcagtgttttgaactttgttctagaagtggctttaacacttccaacatctctagctcctcttgttcctgtcacctccttggaaaggagtgaagggcttgttgagatataattgcttgggaaatcctgatcttttaaaagccccgtggtaacagggaccttgtgcagggccctgaccacttgagtggaagtcctaaggaggtgcatttacatctgaaagcagaacttatgagcacagggaacagaaaccatcataagcatggacaaggttgtagagccaggtcagttggtcctaagagactgcttaggactagaggaacctcatctgtactttaaagcctttggttcagcattttacaagctgtgtgctaactactgcccatgttctaatcttaaaatctgtacaataaatggcacttgaatacatgttttctttgttgtatgggtctgaaagtgagtcatgagacttaaggttataatattttatactgttgaagtaaatattttaagatgtctcaaatgttttagaagttatttttcaattaaccttcctaacccagaggtcatgccaaatatcagggtgtttgctagcccaaaactcttctccatttttaggacatgaccagttaaattgcagagaagaatagttataaagggcacaatctaagacctgggaataaatgtccttaatatttgtgaatatggaaaatgaaatcattagaaacaattctgtagtcagctttatatcattttattgagctccttccattgtcaagatcaagaccacagtgtgtggggggaggtggcctgctgttcaggaatgactttgggtgttgtttgttgactgaagagatttcaccttggtgcttgtgtttgtgtgccagactgtaggtggacactagcccacaggtgtataaggaaggtccattcccatctcagatcaggtagctggtgtttggtagttttgatcactgtgtattataagattctgtgcttagcatggatacaaaggaacatcttatacaaaaatccttctctaaccttcatcttaaaagacttactccatgtggtagtacgttcacagtcatgtatgaagggcctcactggcaaaaccacagtttaggggccacccaactacccaccatattatacctgcagaatcacaacatacttgaattgtccttcttactaggtcacatgttctctggtccctcagagaagagaagccagaaccaccttaaattttaaagttcttttcactgaacagacaacaacaaaatgacaaagttagccaggtaggactggtagcaaattagactggatagcaaaagccacaagcatttttttctctgagttctgttggctggatagtcttagtcaggatgctagcatcattccagttgcagatagccaacttgttgtaatcttattaactgctcctgtcctcacatggtggacagaggttagctaattctgatgatcagacagcaatctcttctaccatctagtggttcttccttcacggtctaattagtcatttactatgtgatacttctgttgtgtcctcagataccatggtgtcccttaaaatgacatttccttgtggtgttgtcagcatattggtttgtacattctctttatgacatttggacaaatgtaaaatgtgtccttgttagaacacaaccttgttgttcagtgatacaggactgtagctccaaaagtgaccactccatgttctgtcacactggaattatactaacagggtggggtgtggaggggcaaacattcagcatctaacaacaataaaaaatacatgtatttaatgttaacatacatttttgataaattagtatactttttaatggacactcatagaaataatgaaaatatattactatctggtagtaatgttaaagtttaaatttaaatccccttttgaatttgagaccccaaatcttcccttcacccttcttcaactcggtgtttttgagtttgacttttgttctttaagccataattgccatcatgaaattaaataccaggtccatttgtcctcaactctttctcattttctttttcttcctttctttttaaaaaaggagttatttaaaaaaattcaaaataaaaattctggttgccccacctgacataaacttcaggtttaattttatatgagttgggaataagaaggaagattctccatcttgacatttggcagacataccctgcttttcagtgactccaggtgattaataagcaagactaaaaataacttactcttcctggccaaaatgtaaaaaaaaaaaaaaaaaaaattaaaaatgcattaaatgcctctgggttttagatttttacaaagatacctaaaatcatgtatgtgtatttgacatgaaagcagaggtgacactgtaggtatgcaaagggggtatacggaggaggaggggcgcaaacccaagccaggaggaatagggaaatatgttcaatgtactcaacatttgtgtttaaaaaactaaaagtctctggatgataaaaatacaactttggttcagatgctgagtgtatggagagtcaagaagaaagaagacagaagacctaatcaaataaaatgtctcctattggtatgtcgacacatgtctgctacctcttttcttttctcagggaagcaaagaaatttgtgagtgaaaatgaaggggctcttgggaaaggaaaaggaaagaagtggtttgcctttaagatgatgatggccaaggtaagcattttcataatttagtctgatcagtgtcacagtgacaccagggagagagagcacactgtatctgttctaagggggtgaaaccaatcttaactgtgtatatgcatagagcaagaactcatgtggtatatgtgtgatctgttacattaaaaatgggtggggagttgcaaccactgatttataccaagagactaacttgattttcccacttccagatgtaaaagcctgcacacccatttcatttccattttctgaagcttataggggctctggtcaaggcttctttcccctaatgtctataaattaaagtgtcataagcaccccctcccaaacctctttcctttttaatcagaaatatcaactaaacactgcaaagaagataataaaaaaatgataggttcgtgcaaattcagatttggggcaaataaaggaaggaagcttacctttatatgcagttatggtgggccacacacaacactgaacccctctatgaagtcgcatttcccgaagtgaaggaggtccataggttttagctgtaaagctatatggaggcggggagggggggttgcaagaaaagtgtgatgatctttgttttcctttaaatgcacacaaatagctaactttacttgcttttttatctttaatatgcattcagttatactgtgtgtgatagagctttgtttctgactgtttgtttgtttgtttgtttgtttgttttttgagacagggtttttctctatgtagccctggctgtcctggaattcactttgtagaccaggctggcctggaactcacaagagctccacctgcctctgcctcctgagtgctgggactaaaggcttgtgccaccatcccctgactgtttctggctcctttatttcaagattggggtctgttgctgtggggggttacagtgcatgtttaaaagtattgcattatacattgtataaagatgtcacaatttacatattcacatattctgctgcagatgggcttttgggccattcctagttttgagtaatcgcttgaacttaagtttagactcttgtgcctacttagctgtcacactgtcctgtcataatgaacacataataatggaaggttatctgcctcattcccattcctcctcagtcttcttgaccatggctaattccacactatggagtaaagtagaaggaagaccttttgagaaatgaatttattatttttttgtgataccatctttttctatttaattgactattctcttttatcaaaataaagtgtcccatgtaagtgaaaaccatgaatcaaaaagatctgtgttcacacaactttaggagactaggggtctttcaagaaagatactacatcttattgataagtccattggttccttatgcactgaatattaaatgcagaatttatatcagtcatcttaataattcgattcctattttactgttgtctgatagaatgaatggatctttctgagtggttagtatactgcctgtaaaatgattagtgatgtgtgtgtgtgtgtgtgtgtgtgtgtgtgtgtgtgtgtgtgtgtttgctgtttgcttttgaattggtttgttgactatgttatgttgctcaggctgtccttgaccttgctatccttgtgtgtcagtctcccaggtaactggggctgtaaacatgtttgacaatcaatatttttttgttaaattatgtggaaacagtgagaaatagagaaggaagtggaccctgctgttttcctttgcacaaaacagcagcatttggtgctagagagcttcctagaaaccattgtcttgagatttgggggaatgcaggaataaacatgtagaaacagggagactctaccttactagtgtttggctttgttttcagaaatgggcaaaattccttcgcgactttgagaacttcaaagctgcttgtgtcccgtgggaaaacaaaatcaaggcaattgaaagtaagtgttcacttgctgtaatgagatgaggcaaagctctgggaaaataaaatctctcaagcttttcacagacctttctccagttatggactcttggggaaattgaaaaccaaccaaaccaccaacacaactaacagggcagaccttgactctgtcgttgtgatgctctgtgttaatcagttggctgcagagatgagacaactgagaaaatgaactcaaagggatggaatgtttatttcagctcactgtttcagttttcagtacatagtcacctagttctgttgcactgggcctgtggtggctcaatacataatcttgggattgtggggttgtcgtggcccagcatgtctcagccccaagccacggtagccatgaggttcggcctgagtgggggagtgtggacttggaaaatcctagcaacccaatggcgataaagaccaaacacaggcatcttgtcatctgacccgtccagcaggccaggttattcgcgggtctcgagggggttgtcacctaaaggggtcatgagggcgagagaggagggagaccatgcggcgcaagaaaggacaagagtccgtctgtgcaatgtcaaggtctcaatttactggggcttagagtgggcttaaatagccctgcaacaatagaattggggggaataatagaaggaacatcaggtatttgggactggaacattcttcttttcagccggaacatctagtggtctttcttggaacagcgaacagaaaagctccagaccctttctcggaacagaagcagttagcagttccgcttggccaaaccatatctaattacaggttacaggaggctcacagagctggctttaagccgcaaacttacaggtcattaaaagtcttacaaaggtgggctttaagccgcatagttttgggcccacggccccttacagtcatctttggagagctctcagttccatgctgtaaaactagagtctttcctttattcagcatcttcttggctatttcctaaccatgcttccctgaccatgaggccatttctctctgctctggtaggcctctcttgctagttcctaattctatctgtcctctcttgttacttatatacctcaccctttgcccaggtgcaggcctattcacctgcttagttctgtagagatgcaaactaggagacattccccactgaggccatgctattcaatagcaaatcagctagcatctgcaattcaatgcagactggagctcccagttactggaacctgaggtttggaccccaagattctctaatggaattttcctggttcctgacatggggtagcagcagcctgatcactttaagacagtgagggtgtgaaatgagagacaaggtggggccttggtcctgtatcctttgtggtactgtattctcaatgacttaactttggtactctgggcccctatctcctcaagatgctactacctcccaggaatcccacagctgacaactgtacaacatgggatgtcaggagcattccagattgaactgtcattgtaccagctcttaagaaggacagcactggagactttactttcttgttttattctgggcaaaagcatgtctctcttaggcaggaaaggaagtattttatactgtgacattgcccaatattgtgtaggcagtgaataatacctgcaaatatatagtcttgggaacttgacaataatcaaaatggcaatttttgaaaacaggaagtctttaaagctcaaattcaaacttacaaagaagaatagacacaaagaatctgctaccttgatttcatagtgaatctgaagggaccagctccccatttcggcagccatgacagtaaccttgccttggtcacttagaggtcagacgcctgccttgtgacaaggaaaaaaatcagaagttagctggtggcactatgctttacgaccctgggtgtactttatggacaagcgcacagcaatgatgcacagagcatagcaaccatcctgggagggcctatgggccatagcaaccagttggcccatcaatacagggcaagccctccaagcctggagggcacaccaaccctgagcctgtgtgtacccctagacactccccttacgctgccctacaagatctctcgggaggccctaggagctgtcttttgtagccaaccaccatggtgggtagacaaaaacccgagctaacatggggttagcttgttaaattacaataaagcctcatgcagtttgcagcaagctctcgaatccgcctcgtgattggggtgaccgaggtcctggcctgggaccctggatacctgagttttccgggggtctaacaaatcttcatgctgtgcaacactcagtatgtatagacaggcaaaagcttgtttaatatagttacatttgcatagaatacagcaattaaaaattaaatgtaaaaaacagtgcattagtaaaaatactataagaagagaaagatggatatttgagaaaagaaatcacagttttggcagagatggttcctagggttatgacaaggttctgactttcatccatgcctgtttagatatgaaactggctgtcctggtggctaaatatggcattgtgtaattgatacagaggctccactggaagataaaataactgatagccatttcactgacatgattggtcatgtttggatgtggctgtctctcagttcctggtccctcattaaatggcagttgttaatgaccgtgaattaaaaaatatcaactaatgattttcatgtctctccacatgttcttaaccacatattatacctttcttgccagattttccttcagtgattttccttattcaaaatgctaccttttaaaatgaatcttttaatatcatctcactctactttatgtttatttttcttaatagacatgaaagcaggtatttttttgattacatcaaaagcccacttggcactcaacaaacatgcactgaataaattacagatgtatttttttcaaaggttcatacaacattaggtattaatagaagaaatttcattaacataagaaaaaaaggacagcatggaattcttagttgtcagtggaacagctgaaatatctaatctaactccaaagaacagaacatatggaccattaagatcctgatcaagggccatcaagatggctgagagggtgagtaccactgagtctgatgtcctgagtccagtccttgggacccacaaggaggagagaacaactccataagctgtcctttgacccctgcatgtgcatgatgacatgaacatacacaatatgatagaagttaaatataatttaaacattagaaaacacatttaaagaaccttggtcaattaacatggaaagaactttgagtttgtccttactctgccgaatattggctgtgtaccattcatcaagtcatttaaatcctctgggctttactgtacttctttatcaggagtgagatgtgttctgagaaacttgtggactatttccctttcacgtataaattgttgtttgtgtgggtgtcctatttattcaccaggactgaggtttttcctcagctgtggagaactggcctatcagccaccaccttaactaggacttacccaatgttgccatgggcccaacactctaccaacatcacttcacctaatattcagtgtgcctgtggggtatacatttccttcctctatagcacagtcatagttgaattcagttgccacagagctgggagagtctgcctaggtcctgcctgtgtagcttatcacgttgagcaagattttagaagctttttccttccatgctctgccagtcagtgagggatgagtaaggcagaatccacagacatttatttgggaattcgttttgttttctcaggtgtttaccctgaggaagttatttcattacatatgtctgttctgtaataatcatagtcatacgcacaccacatgctttcagattatggtctgagttagacttcatgaaatgtgaaggattatattctctgaggggttgtgtggactaaccagctcataggaattactctgccaggctgggaaagtgtatttctgagatggtctttgaagctgaactgaatggaaaataaaaagcaatgtgacatgtaatcagttttctaaaaggttaaggccttcttgtctctgccatctgtacacttcagatggccctttttcatctctggtcctctattgctgtatccagggttctatatgaattcttcaggcttgataagttgttatacaaagtccgtccatcccaacaatacacgatacataatttacaatcagttttagatgtataatgacatgtaaaatcatttatgcttttgaataaaaattactgcaaaatttaaatggaaaacagatctttattatttacctatttaattatattctcatttttttaggataaagttgactaaatatattcccaatttataaaacacaatccattataaaagtaacaaacacttctctctgaaagaaatgacagtgtaattatacagcagcttcaggcacattactttactgctttgaatattagaaccattttaatgtatatctcatgttatcttaaaaaagaccttggctcttattaatgatttcaaaacttctcagtgaaagtctactgtgtgcaaggtattttttaagccccactgatagtgccaaaaacaagctaaactccctatactcaattctgcatgggaggttgagaggagaagacacaataaaatataaaccagagaataataaagttgggataggttatggtaagtgacatgcacacataaggcagtagtatgccgcacccaacaattaatctagtccaattgcccctactttttggtcaaactttaatgtattcttataaaatgttatgtttatatgaagctgtagtggagttccaagtgactaacctccaagtttctacaaagtttgggcagcaattggcagaatcaagggaaaaactgaagtcagagtctgaacttcatgccattaccatcttgattacaaggcaacctggatggcctcactagcatgggtcggatactctcctggtaactcaaatttttctagtttaaagaactgatctgataactctagcctcggaggatgcagtggtgctctatattctggggttttacaggacagccttttaagaaagccagtgcctgtgactgtaggcttactgtcattagcattgctgtaggacctgaatcaaatatctacacccaccaaaatgatgacattactattaaaaccataacaaaactgagtatttctcaagtagagagtataaacctctctcagaatcaaactctacttttatttaatagtagatagaacagggcttgctaaatgttttctatttgtgatcctgttttgtccatgtccctggtacttaggtatacaaaatagcaatacaaataaaatgcttactgatattaaatctttttttttttttttttttttggttttctgagacagggtttctctgtggctttggaaccaatcctggaactagttcttgtagaccaggctggtctcgaactcacagagatccacctgcctctgcctcccaagtgctgggattaaaggtgtgcatcaccacacttggcttaagaaattgttttaaaataattctttgttgcacatatacttttacatataaaaggtggaaacagactttatactaagatgtatgtgtgtatatttacataattaaatctccagttaataatcagtattgtaggacatagagtatcaacattttctagagctgattgataatttgatcttgaaagggccattctgtatagatatgcaatacataatggcagaaatatacttagggtcatttaaaaacttgtcagaaatcctgtcctaattctgagccaaaattcattcaataatttttttctatgcagttctagttagtaactgaaatagaaatttttaacatcaagtattccaacagggggctggagagatggctcagaggttaagagaccaactgctctttcagaggtcctgagttcaattcctggcaaccacatggtggctcacaaccatccattatgagatctggtgccctcttctggtgtgcagatatacatggaagcagaatgttgtatacatcataaataaataaaaatcttaaaaaaagtattccaacagaattcaatgtaaatatatactaatttacatgctgggcggtgatggtaggagaactttgttttatggaactaaatgattatgtttctcagaaaccagacgttttctgtctcactacttcacaaatctaaggaaggcatctcaggcaatgctcattggcattgctggcctgatggcattcatggtgccaagtgggaacatgtgctcagaaccaaggctgctataaagtcatactgtgctgcacaggccagccttgccagaggcactgtgggttcattatgtgtttgattttgagtgaagttttggtcaccatgtattcataagccctttatggttgacaaattattcatgaccacacttcggttgttcgaccttagggtcatgacctccagtttgcagagtcctggattgatcattgtatcaaaaatatgctgtagtagctttgtttctcagactagaaatagcttcaaataggcaacccaaagcacagagtctaaacctcatactgtcctcctggttcatgaactccaggaaacacaaagtaagtgtgtcacttaattttctacccctagactcatttgaaaaacattgtttcatgaatggtgtcattttcattgtactcataaagccagtcatttacttggcctttctcattcagaaatgtgtgtgtgtgtgtgtgtgtgtgcgtcttactacccatctgttcaggagaaaattacgtatgatgacagtctacaaattacattccttaataataaataaccagagggagaggtgaagccttaatctttaatttaagagacacaagaaaattcatgacaagaatatgcatgtagttaattttcactttaaaacacatgaaagagttttaacacatttataatgtattatgaaggcagcatttatcagttgtgttaaaaaaaataaaaggaattagctatttatgggtacagaccaaattgtgaatttgaatagccttagcttcagaaattatttatattttttgagatatacatgttcattccataattatattacatattatatttacaaataactgtagttctacttgaggagccatcacatcatgattaagagagacctagatttggagccaaggactttcagataaggacagtcttagaagccaggcttattgctaatcacctgtgttcccatctcccagggactggttggctaaacaggctagttcatagagatcaagtagaggcccaaagcacagattcgttacatttcagttataattaatcaaccctgcttctctcaatttcgttgtttcagtgttttgtgagactagtataagttaacaccgttaggatctagaggcagctaaagaggatgtttggtaaagttcttagtatacttgactggctgaccattgagggaggcaagctacagtcatcattgttgtctttatcctgatggacatgactgtttttcacttacactcttttagctacacagtataaataagagttttctctttagcaagtgccggctacctccagtactacataacatctagaattatatatatagagatgattgtttcccacttttcatgttgagacaggaaaagttatcctggtgcttggataacataagctgtcctactgtatcagctatagtacctctgtcatgctatttcatcttcacccactttaggttgaatatggatggaacatggccttctgaatcccctagtccctctgactgtgtctaagtcttttcaatagtcatgctaattttgatggagtcagtttttgtgaagttcattttctttattccttggattttataaaaaattcacctttaccttccaagatacacagagaaactctttctcaaaaaaaaaaaaaaaaaccaaactaaaaatcaaaaataaacaacaacaaaaagaattcacctttaaatggaagagttgtgaaactactttcaaagaacccaaattttagtttggatgctttagactcagaaatatgtttgatccacaatatagatatgtgttttggaagaggggatgatttctcagctatgcattttgtttttgcatttgagtgttttaaaattcattcccaagggtcttgtttgcccgtggttgtgtatgagaactgtgagtgaggaccatggtgttaaccagccgagaaaagcttaacaagaacaagcaggttggagaggaaagaaagatggaaggaaggacagatggggacagggaaaagaaagtaatgaagaaaaggggggaggagaaggaggagggaggaaggaaaggagtgagggagaaagggacatgccatactctgctcgggtgtctacatcagggggtccccccatgtgtttgtacagaaagtcttaccccagctgtctagaggcagttgcttgttctcctccagtaagtgaggattactttaatgaaacttgattagtgagcctggctgagcagccctcacagccctcaggtagttgttacctgagaactgagataagaactctgcaatggttgaaatcagtgggagccaggtagatagatgatcagatgtctctagaggggatgtcaggtctgctttagttttgttcaggcaggccagtgtacatggccgcagtatcgtggcaggtctggtcacaggtaactgtagggagacaccgtaaccacgcctcctaagggctggctacagatgtgcctgaccacgcctgtcaaggcatggtgaaggtgagatcagggtgactccggaggggctcttaagcagccacgagcacatggaaccttcgattcttcttcttatgccctttctccctggcctcgctgctctggcttgcctttggctggtatttatctgaataaaggtatcttgaatctacaagctttttccttcaggtaacccttacaatgtgccatgaatccaaggactctaatgaatgtaacacatattcttggacatcaaaatcattgattccttccttcttaaataccactagagattgacttctttcaacatttcaaaaaaaaaaaaatagcaaaaacagaacaaaacaaaaaaatgaaaacaacataaacctggttctgttttgtggaactcaatgaacctagctgaaagatagactgactaagcgtcagaagcaaaagtactatggatgtgaggttggcctcaccttagcaagagaggttgtgattactctactggggcctccccttacctgtagaaagccttctctaatgggaaagtttcaaagccagaggtctaaagaagagcattggttctctatggagactttgctcaatagaaagtatcaacaggactgacacagggttgctgaggctgtgcgctgacttcccttgaatggccaaaagtgattgtcagtgagactggggaacagcaatctagatgctgggccttaagtgatcaccaaagaaacatgggcttttatttatctaccacatctcatcctgagttttacagttcctgtgggttttctttttcattgcttaatcttacgcgtgtgaatgttttgcctgcatgcatgtctgtattctacaagtcttcctggtgcccaaggaggaaggaagaagacattagatcctccggaactggagttagggatggttgtgagccaccatgtgggtatttggaattgaacttgcatccttttgaagaatagcctgtactcttaaccactgagccatctctccagcctggaatccttattcttatttcactaatatgagctttaagaagatgttttatgcttttgtatccacattcttcttagtctgtgagaatcagacagatctctgcttttcaccagagcaggtatgagttgacagagtctcgcccactgctgtctatcggacccccaaagctcaaatgggattttgaaaaggcatgtacacatctgacctccagtcccactacttaatgcttacccaatactttacatcacttttcaaacaaaatactactattatttagggcactctatccagcatggtttggcctccagtcaactctgtctttcaccatttgtctcctgcattagagtctggtcacacaggctttagttttgtttggctgcccaaagctcttgcctgtatcacgatttttccacttagcatgtggctgcttctgatgtctgctctagcatcatcttctctaacaccttcttacccaaagtaatctaaagcaacacctcttgaagggaccagcttccctttcggcagccataacagccgaacatgtgcttgccataaacttgccttggtcacttagaggtcagatgcctgccttgtgacaaggaaccaatcagaagttagctggtggcgctctgctttacgactctgggtgtgctttacggacaagcgcacagcaatgacgcacagagcatagcaaccaccctgggagggcctatgggccataacaaccagttgaccaatcaacacagggcaagccctccaagcttggaggcacaccaatcctgagtctgtgcatacccctagacactccccttacgctgtcctataagatctcttgggaggccctaggagccgtctttgctagccatcagacatggtgggtgggtcaaagacccgagctaacatggggttagctcattaagctacaataaagcctcatgcaatttgcatcaggctttcgcctccattctgtgattggggtggctgagatcctgggctaagattctggaagcctcagctttctgagggtcttacattttcaacaacctccctgtaggacctgtctggctataattctcactcacatacccgttacatacaatatatttgctgtcctatacctcactgaaacatcagtcctcagagacgccacaccacctgtgatactatgttctgtattgaagaaaaattctgccagaatatatttaagatgtgcagtgtgattttcagcactgcactatctctgaaacatgccagtagtgatgagaaacagcaccagatggtctcagaaccacccatgagggtacagtcaatgttttttggaggaagggtgtgtttatcatttgtccaagaaaaagagcactgcagtcactatgattgtccccaacagcaggcagagaatgagagcagctgttttccatgcatctactcactgaactcaaggactaatgttcacactgtaggtggttcttgtagttgctaaactaaataaagggagctctgccttggatggaccctgaaggcctagactgcattttacagagacattctgtaaagcttattcagtctcctccctagggagtgctgccatgcctctgaaattttctccccaagggagagaagaggagaggagagaggaggagaggaggagaggagaggagaggagaggagaggagaggagagaggagaggagaggagaggagaggagaggagaggagaggggaggagaggagaggagattgccaatatgaaatggtcccatgaatgtcagttagcagatgtacttccattttttaaattttatttgtgtgtgtgtgtgtgtgtgtgtgtgtgtgtgtgtgtgcaggaatcctgattgaccaggagagggagtctgattacctggagctggtataataggcagttatgagttgcctgatgtgggtgctggaagctgaactcctgctcctctggtggagcagagtagtaagtgttcttaattaaggaatcatctctccatttctgattagatttactttggagggccactaagataaagctactgtttcattgttgtttttgactttccttcagccttttaatttctgtgtaataggtcagtttggctcatcggtggcctcatacttcttgttcctgaggtggatgtatggtgttaacatggttctcttcatcctgacattcagcctcatcatgttaccagaggtaagctctgacatccgacttgtaagagatactgaaacaaagttttaagtgactgctcatttcccctcctccaccagaataatgtgactagttatgatcatctcttaagtgataggatttacaagcttaaccttcacaatagtacccacagtcgaaggccctaatccttgctccaaaggtatgtgtccctcctggagttatatataacatgctgtgtttatgtctgagtgtgcactttaagtgggaaaaattatggctttaaccagaatcacattggtttgtgccccaacgttaacacactattggtcagtgggaagcctactgagctgtgtttatttttgccaaatttgctttcaaagttgttcttcacacaattgaaagttctagcttctctaaactggaggaacacaacaccagtagtgtttcctaaaatcaagtttcgcctgtctcatgaacacagtggatggggtcagtggctgcagagtactttaagatcaaaatcagaaaaatagagggcttggactgaagaagaaacaaaaccctgagctgatgtggggaagatggaggtgcttccagggtgcttgctggcttcacccccatgaagtggctcagatgtcttggggcgttgcttatacttcaaaagctgggtgggagctgtttaaactacaaagaacctgttctggtaccagtattttacaaccaatttgttcaatgcaacacattatatccacacagtttaaagtcaggagttctctcttccatttgtcacaagcttccttgtcagccaaataacattgccttacaaccttaaagggatgctggtttcccacagaacaaagtgctttcacattctgtatactgagctcacaaattcctaaggggattgtagagactttccacccccatttgaaatagccccaaacacttggtgctaggtaacttagtaaccatagctaagttatttagtatttttggtaagttggcctgggtcttgaacccacacttcttctatcacccagagttttcattttaatcagctagttttataattcccatgacaattctggggcttctaagtctgtttggctgagaagacagcaggaatagattctttcccaagttaaaagtttcaggcagtgtagccaactgtgtgcatctcacccatttcaaatgcaggcttactttatttttgctcatctatctaaggaaacctgaaactctgccctccatccctgcctactgctactctcgttggcttcagaggcaggtagagctggagtcttttcctcacatgctgtgttagctttgtatggaggaaatgaaaagctctcagtaatccctttgaactatacaagattatgtaaagcacgttgtacacactgatggaatgagctgggactgtcctgcctttggtctcctgttcgtgtttgtgtgcatgtgcttgtgtgttagatattaaaggacatcttctttcctggtgatgatttctaactcctgaatagaaacaaaagaggatgtgctccctgtgtgttaactgagcagatacaccagagaccagagctaagcatttcccaaccacatggtcatatttcatagctgcctttatagcttcatagtagccccacctagcattgttcttttgtcccagaggttcccatctctctgcaatcccaatacctcaattaccttttatctctgtgcctctcaactttggagtgaagctgtgtggggagaaagcacttcctattctgttcagtccaggaagccaaagcaggcgaagggctgtagtggaagaccatgccctttgtacagaaggaatcagtgaagctaattcctagcctttggctggccagcctctgtgctcaggattaaactgtgcttcctaaccctctaaggggctggaggaggaagggttcccttcacatatgaagcaacttttgcttggccagctgtgggggatgaggaatgtctcatagatccatcctatgaccctactcttgccctattcctagttcacagctcctcgatgctgttctctactacatggcttctctccttagcccatagcacagattctgatggaaacggcacaggtgctgctgtaatcagtatgtgaatgtttgctcccagtagatgccctctgattgattacatgttggttttcctgaggcttcagtcccttccaatgaaccctcctctgctaaggggagctctcatatgaaactgtggctagtatcattttgatgaacaatgtggtgccccccccaggactacctctcctcttctaaatgtggctactgtcacgatagtgagtgtagagcttctcagcaagcctcctggagactgtggttggcccactttgctcttcatccagtgaatgcagagtgtagggtctttacttcctttgttcttaattctggacttagtggattcccggaaaacgagaccccacatggagacccacagagtcccaatggaaagcgttcagaagggttttaaatgaaaccatttgtgatcgcatgtgtagctcagattttgtgtccaattgttcactgctctttttgcttcaactagtacctctggggattaccatatggcagcttacctaggaaaacggtcccgagagctgaagaggcatctgcagcaaactttggcgtattgtacgacttcaacgtaagtgttgtccacaggggaacagctttttctatgttgctgtttcctgaaacacgaaggcctcttacagggctggtagaatgtgttaagagagatgttcctgcctcctgtttgtaaaagactatatgtgtagaatgtgtgtgtgtgtgtgtgtgtgtgtgtgtgtgtgtgtgtgtgtgtgtgtgaataaggtttacataaattataatatgattacataggagtattgactatggactaaaggtgagctcacatcccaaagatttaaatcaaatattctttatttccctttggaaaagaactcaggaagaaattgcaaatgtgctttttgaaaaatcttatgggattctttccgaattcatttttctgcttcatattaaactcttcacaatcctacacaagattcatagtaatattccttaatagtcactgctaaatcaagttaaacatttacgtactgagagataccaaagtctaagtaatactaaaataagtactacttcattgtagttctgaaataaatactatttatttctattatagtgctaaagttagtcttattcaatactagttgtcaatttaagtggcctggggatagagaaccacaactaaggaattacctctatcagatcaagaacttatgaggctgtctgggcattttcatgatttatgattgatgtgggagggctctgtgtgtagtgttatccctagtgggcttgggatatttaagaaacacagcaagccaggacagcccactgggagcattcctccacatatttctactttttaaagttcctgccttgaattctgccctggcatcccataatgatgaactacaccttgtcagctgaagtagatcctttcctccctaagttgattttggttactggtttattgcaacaacaaatagcaagttagaacatttaattcctacaacacagtctatatagtttgactgtttctagacttttttctcaaacaaatgaatctgatgacatttagtcttgtgactctcttgactagtaagcctgagggatgggaagatttttagatctatatgataaaaaaacacagatataaatttatgtgatcagtaccagaagacacaaattttaagacagagttccagtctcttcagaggacacagtaagctactaaggaagcataatgcataaaataagtagcaagtgtgccattttgaatcttcagtcaccctaattggacatttcattttaagtcagcatttattcactgaatataagcctacattgtccttacaaaagtgaacatgatgtggatgtcatgttaataggagaaagacagacagacaactgatatatgatgtgttatatgccacattagcacaacagaaacaagaataacaacaataaaagggtcctgaggagacatgttcagttgcggtgtcttagttacatttctattgctgtggtaagatactgtgcctaaggtaacttataaaagaaagagtttaattgggcttatggttccagagagttatagtctaggatggcagagtgaaggcatgcaaataggcagctggcacagcagctgagatagcacatcttaatccacaagtgggagatagcatatactgggaatggtatgggtcctttgaaacctcaaatcccacccccagagaagcacctcctccaacaaggccacacctcctacatccttcccaaaagattctgccaactggaaaccaagtattcaaacataagagactgtggggaccattttctttcggggcaccacctgtgattaactctgctccagaaggggtgagctttaccggagaacagcacttctaaccttgagactttaaacttttcattattattgtggtataatttacagactatcaaattcacccagtgtaagtgtatgatctgataatttaaagtaaatctatgcagcagctgtcacaagccaggtttaaagcatttccatcacctcctatggagctcttttgtgcctgtctgtagtctagccctcacctcccaatatcacaaaactattccatctatttctttttatgtttttgccttttctaaaaggaattcctttgttttttgaaggagtaaatgcaatcatatgacactgtgtatttgtagtctgttatctttcatttattatgttttaggtttactaatgctacatgtgcatcataatccattgcggagaacaccacgtggtgttatgtttttgtttaaattagatataaagaaaaagaggaggaaggcacaagatgagacatgttaaccaatttattattaggcctggtggagtagggagactaagagagaagaggaacaggggcaatggctgaccaccatgactggttgtcatagagaggcagagagagtgtgtatgtgagagagagcaaagaagaggcagagagagtgaatcagggaagttggaacttttaaagggaagactgtgcatgtgcaccgaggttccacgcatacccagagtcctcacgcaggccataatgtgtggcaggtgacgtggtgatgatgtcgcacattttcctgtgcatgccctgactgttttcaggaggcagggtctgtctcttaaagaggtagagctgatcaacattaaagcctgaacctttcgcatggcatggctttaatttcctttgtttatctattcactgatgaatgatgtgtttccccaatattttgtttattttgagtatttctactgtgaatatttgtttgaatgctgcttgtggactcacacttgcatttctcttaagtaggtaggtctcagtcgagttacttagtgtttatgtgcctaacattttagcaagttactggtgtccagagtagccacagagtagatgtttccacagtaggacttaaggataatactcctccacatctttaacagctgacattcttattcttttgattctagtatttgccattgaaattgtaatttctttgtaactttaattcacattttcttatcacatattgacagcagagttgcatatattatggggtacaaagtgatgttacaatattttaatgtaagataaaatgattaaatcaaactaaataacctatcatgaatgtctaataattaatgattttttgtgataagaacatttgaaatttactgtctcaataatatttaagtgcacagtactccagtattcagttatttgctatgtttattgtgttttggaatagatataaaaatctcatatatattcttcctgcccaagtgagctcagttttgtatcctttaattatcattcctcagatcctcccttcctagctctgaaagctccattccatttcttgtttctttgtgtttggttgattcaattgtacataagtgagaacatgtggtatttgtctttctgtttggctctgaaagcaaacagcagttaggaaacagaatggctgtgcaaagcttattgtatcagacaaggttagatttgtggttagggcaaggtaatgagaggtcttttgtcttatagtaaccaaataaataaattcagtcaagctctaatgaggattcactgaaggatccatgggaaataaaattagcaaattactcattgaatatgattattcctacagaaacattaatattgttgttttatgagatgtttaagttttatgcgtgttgaggcttgagaactgttgtccacattgttttattcaaagattttattctaactttggcagggaaagagtttgactaatgtcaggagtattctggttttttccatttgtgtcaggagaaagatttagccaccctagtataaacagaaatgactgaggtggtaacagttgcatagatgactatgtagataatgatgactctagattaatagataacagagtagatctaaagtagtaacttaacaaccagaagataattttatttataactaatcctaattctagaaaaggtgaactttaccattcctgctttctagttgggaagcctaagtgctcctgggctttgcaattttccctcagatcttcaggtagtaaatgacagggctgggtttcttagcacaactctgaatcctagaagttgtttctgtgtttactgccagaggctcctgaggtaactagaatttttatcaggaatgcagaaaataagagaactttatgcatggaattactgtggaaatcatctactctatgctcaagattggacatggggaaaagtgagctcaggacctttggctgagcaagccctaatctaattttctactcatgtcctatgtgccagcagcaactttccagttctacttttcagtagaatgttcatggatgtttcttgaaaattaactggctttgttcaatgctgtgcccaacccagagggaaggaatggaagtggtttgatcccatttcctactttgacagtaaacttgtaatttccaaatcagttcctcaaatggaaagtcagacttctgacgtcttgcctgagttttgagttgagcatctggacagtgacttcacagagggcttttctctataacataaggtgagtccggaatcccatcatgcctctgttacggtaaatctttctgccaaatgccgcctgagccccaccgccacgtgtgaactttacgccagccgcctgcccgagttaggcccaaatgaatacacagaaacttgtattaggttcaaaactgcttgccaatgactaggacttctcatctgctaactcagtcttaactatcataaagctatatattttataaaacttatcttattggacaccttattggcgtccctccttgctaggatcacatcttgccactggagcaggagaggagggggaaaagggacccttcctgtttctccttcgcttaaatatgagtctccttgctatgtcacttcctgcctggatcagcacttctctactacatttcccagaatcctctttgactcctagttctgtctaacttactgtctcattggccaaacagtgttttatttaacaatcaataagataaacatacacagtagtacattccccatcatgcctcctcagaaggaaacataggggactcttcattctggcttccaaagaagtaccaggaaggaaaagcgtgttcaggttcagggaggagatgacttgtagatggacagttaggccacaggttagatagtttcttccaggcaaaggaaggaaagcaagcccttaaatctgcatttacagaacattaaacatagatgcaagtatgacctcttgtggtagaagaatctacttaatagaaatggtcagaaaacctgggaaagagtaggcaaggtctactgaacttctgatgtggtgaacctcatttgggaattttggagtttccattctagctcagttatgtcacttgaaagaactttcttcaacttatcaagacctctaattagtagtagataagtagcatgtaacacattttaaagtaaccagttttatgatttctcagagtcacaaattataattcacagagcaaaatggttttgattctcttatagagtgtcaagtagtaggtcttactgttcaggagggaaatctattttattaaaattacaagaaatagactaatatgtatgctataaaccaaataggcagaaatgttataattggaattagtagaattaaaaaaaaaaggaatttaagtctgtgttaatcatcaccctgtcactacaagggaatctctgggataattaatttatatagggaaaaggtttattttgttcattgttctggagagtctgttccaaagtcagacagacctgtgcctctggatatctggtgaagatgttgagtgacaatggtggggagtgggttgtagagcacactgctcatctccaacctcaaagcaaaacagcaagaagagactagacccttgcagaatttacttcctgactattcacaacgaggagctctccttagagactgtctctcactggtattggcctgaggaccattatcacatgggctttgggggtgggcagtcaaaatgcagactgcagcaattgggaagacagaggatgacactattggcaggatacttggagacatggggatgatgtggggaagagggagaaaaggtagttttagtatcctagtaaagagaaagaaagtgacacgaggttggaatttggaaggtttttaagctgacaatagacactgagattgagatcacagaattgaagaaacatgcttagactaaaggggaatgcagtcagcttttcagcttaaggggggtcttgatcaatgtggattggtaaacagtgtgaatgagtggactttgtcttccgttttctactggtcataaggatatgggagttagaagtctttaaagggtcaggagagaagagataacacaatcataagcattaaattttacatttgaccttgcattttatcttcataacaagccttcaagatagaggctattaatatatttacagttgctaaaggcaacacagataattaatggatgcactgaaattctagctaaagtctggttgacttccatgtcaagttgtttgctttattttaagcctggttctttcatatcccctccttgaagcttgtcctcaaaggaccttggtttgcagcattaggaatgttgatagataggggtttggtttcttgcttaaccagtgtcaacagctcttttaaataatcttccaaagtaacctgtttactctggaatacagctcatgtcagtttctttttctcttactgcattgatcgaactcagagagatttttgtgacttctacaaagaataatatatcctctattttaaaagtatttcagtagtccaagtgcatctttattttcagggaatcatttaaaagaggagaatggctttagtttctcaagaattaggcaacaaagctatgttgcatcagaaggtgtttgggggcaaattcttatagaagagaaagggaaaggaaacaggggctagataagtagagcaaccataaatcagggcaagtctgacacttgcaaaggaaacaggataggaaagactatttcgtggagtctgaagctagaggggaatctgtactggtacacctgtactggtgccccgtatgttcagagactggatgggcagtgtgcattataagtggcctcattgtgaagtgtcatgatggatacaaggtgtgaaaaatgggaggctgtctctgtaaggagctctgagcagcacatttgttcccaaggggtttcctggcctggaattgacttccctcctttgaaattcaacagggttaaaatatgggcagcatggctgctttgcctcagtcattgttgagcctaattctaaggctgggtcagcagaaaccctcctcctacataatcctcccttggtgacatgacccaaaacagcaggctaagcttcttggggagaaaaacaagcttatatatttgcatttccacatagagtctggggctttccttagatatcctaggactgaaaggggtgaggagtgtgtctagtgacattcttgtagccttcacagagcaggctagaatgttgtctgggcacatggccagggcttggcattatcgaagggctgtccacacttggctaccatgattgcttcacttcctcaatatccagcacaatttcctcaataagctctcttaggtcattaaaggtagaaacaacttacactctattttgcatcccagatttttctttcttggttcattagtttttcatcctgttactccaagacttcattaaatccagtgtaaagagtgacagagattctttggttgcttttagaatttttgttttcatcgatttgtggattcgggatctcatcccatcgtgtcttcctttcctttagcaacaactttcagattccatcacttacagtctagccacacctggccagatgaagaggaggcttcctgctgaaagtatttgtgatgcctttagaggctagtgcttgctgtacttacatcatgaaaacaacattctttctttgggtgttataacagaaatgagtcttttgagtcgttcagcaaacatttgataagcatttgccaggtgacaggtgacagacattaagcaaaagtgagcaaaacccagccaaacttctgtctccaggaatagcagaatagtcaaataacacacacataaaagaaagaaaagaaaaaagaaaagaaaagaaaaaaagataagaaaggtaatagcaactgctatgaaagaaacatagtattgggagaactgcactgggggacctgacatggctaagggaagcagatggatgagaggaaaagcaatttttgagaaaataaccctttgcactctgaagagtctcatgatgtcttgacttgagaaagatgaagcaatctaatatgtacaacagcaagtgcaaaggtcttgtgatggggatgggttgcctctttttggcctgagctagtgaaagtagagctcagaatgaggggaagcaggaaatgagggcactggtgagataagaaagtgtcgaactgtgtgagatcctctcaaatctagagtataatttttttagagtaaaatattttaagcaggtcattggtaagtagtgacatcatcaagcttagatttagagaggtaaagagactgactggattgaaagtgggcaagttcactagaaagagagtagaggagagtctatcagtatgttctgatgagtgactaggattgtgtgaaaaggaattcaccttgcagagttcacttgtatttaaaaaccagcaagttagattataacctactaacttacatttacaagtgcagaagtcagtcgaccaaagaaactcctaatgtgatcttttcagcctccaattttcaggacaaaggaaaaacactctctctctctctctctctctctctctctctctctctctctctctctctccctctctctctctctctctctgtgtgtgtgtgtgtgtgtgtgtgtgtgtgtgtgtgtgtgtgtgtgtgtctagagatcagactcagagccttgtatatcttgtacacatataggcaagtactctgtcattgaactacttccccagcagctggaaacaatactcagtagagtgcctttgcaacactgagatcatctcagttttttaaaatatgagttttagatggtacagacaaattagcttttttttttggtttaacttgtgtctctcatactttttgatgttttagttcatgaaattcaaatataagattacacttgtcatgttactgtgttgaatgataccttgtgatttattaaaatgaataagcagtgtgcaggtgtctagagagaggtgatttagatggcaatctactgatgcttattctgagtgagggctgctaatgatcactgaaagcaatttctttattcactcagccattgccaaacaaactgaatgagagaaactgggagtgccaagacaacgaacatgttccctgcccacagggatgctatggtctaatttgttgtgcaagtcaacagttgttatgcaatgctatattctcagatgatcggatacatcttttgggcatattaaagtacagtgctgtctcggtatgggtccaatgttcaggtttactggaattttattatctagagttttgagagaagtctatcaaactgtaactatttcctacttgagttctgaataatttgtttggaaaggagaagcggatggaacataaaaattccatatccattgcttatagagacctaattggaggacaacttaagaatcatagccaaatgatcttactaatatggaaccaaaaattaggccattttaccatgaggtttgcttatttggtacaggagggagttacctttgggctgagacagtccagtaaatttcattttagcaaatagagactccattgcacctccccaaattggaatgagaagaatagaggaggggcattaactggcagagtaccagctacctgatgattctgagagaattgtttctctttaacatatggctcttgagaagtcagcagaagccatagcccaggaagacaatttcagtatgctaagagaccgactgtatccaataggaagcagatggctagagggccatgaagcaagatacaaacacattcagtgatgaaccttgtgatcatgacattgacattgtgtgtgtgtgtgtgtgtgtgtgtgtgtgtgtgtgtgtgtgtgtatgatttgtgcgactttagaaaaaggtattcctttttgtttatgtgtatatgtttgtttgcttctctgtatatgaaccttgtgtgtaccataaaagccagaaaaggcatcaggttccctggaactggagttgcagatggctatgagctgccagatgtgggtgtggggaacccaaataaggtttttgcaaaagcagcaagtgctcttaaccactgaatcatctcttcaacccaagactcagcttttgtgtgggtgttggggattgcaaggcaatctctcatgctttcatggcagacactttatgactgaatcatttcccagtctccataaggagatgactttttaaagtcaaccaaggagccatcaaaagacagcaggacagagaagggaatttgtgcaatacaagaatcaggcagaaactataggttttgactagtaactggatatagactattgctgccgagattttattctgtatgtttctcttgttggttgatgaataaaacactgattggccaggcaggaagataggtgggactgggagaggagaagtctgggaaaggtaggcaagagagcctgccagaacagtcgcaatgtagcaggcaaagcagttgcaggtccggcatcctctggtaagccaagaccacgtggaaatacatagattagtagttatgggttgataattaaaatggagctagccaataagaagccctagacactggccaacagtttcataattaatatagcatccgtgtgttcatttgaagctgaggtagctgcggaaaagggcaagaaagctcatgttacaagctatggatcaaaatagaacagcaaatgtaaacaaccaagtttctagcagaggtaatttagtgccactctctgagaaaggagaaaaaaaaagcctgtttgggaagctgtttggaatgtgctaattcagacctgtgggtcacaatggtggaatgaaatatggcatggacactgggctatgggcttagattcatacccaaatgttagttgtgggcacaaaaagctgggcatggtggtgcaagtctttaatctaagcacttgagaggcagagacagggacagggacctacaggggcaggagtaggagcaggtgcctacaggggcaggcaaatacaactactttttataaatgacagaagagttataacatagtacagttaatgaaagaaactctatcatgggattcacatgcattcctgttggaatcttactgaacactgcgtttgaggtgccagataagtaccctgacctttggatagccacatgtaaaatattttactgagagcatgccaagctggcagaaaaaactaaatgagattatgtatgttaagtatttgtgcaatgtctggtacttggtagatgtggtttgactaggaatggcgcccatagacttgtgtgtttgaatgctttgtcgtagcaagtggcactattagtgtggccttgttggagtaggtgtggttttgttgaagtgtgtcactaggaggtggactttgaattctcttaaatgctcaagataggtctagtgtgacattcacttcctgctgcctgctgattctaatatacaactctcaactcctccagaatcatgtctacctgtatgccaccatacttcccatcatgacaataatggactaaagctatgaaactgtaagccagccccaactgaatgttttcctttataacagctgccatggccatggtgattcttcacagcaatagaaatcctaactaagacagtaggtattttacaaacacctgttttgagtatctatctcatgaaaatattctgaagtactctgaagataaaagcctgatatttacaagtcaaagccaaaggaagttgtatcagcatctctggcctgtaaaaggaggcagaggcaagggcatctattcacaaaaccaatggtttttgtcacagctttgagggatggagtctttgacacaaacctgctgcagaaaaagtctgtggtgggtcagccctgctttatctctctaagacacacattatgcatcaagaaccatgtgacaagttttttctgtggtaggacatagaataaagccaggagtggtacaactctatcctatggtgatattattttgagtttttagagaaatctctgtactgatttccatagtggcttcaagggtttatagttccctcacagtaaataaggggccctttccccatttccttgccagtattcattgtgactgttacccacagatgaatgaggaaaatgtagtctatacacaatgggattttattcagctgtaaagaaagatgaatgacatcaccatgctcaaaggaaaataagaggaactagaaattattctgtaagcaaaattttgagacttagaaaggtaaatatgtgtatgtgtgtgtgtgtgtggatgtgtgtgtatgtgggtgtatgtgggggtgtagaccataaaaccagaaagggagtcagagtagggaaaaaaatgaagtcttaagataaggttggggaggtgaagagaggagaataataggatacatatatcataaaactagaaaaggagctagtagaggcgaaagaggaagagccagtcggaaggggacctggggacaaggaagggctgggaaagataacaacaaagaggaatgaaaatatcatgttgaagcccattactttgtctgctaattaaaaactaataactaaacaaataaacaggaaccatgcagcatctggtctagtttcctgaatctgcatttccataagaagaaaggaagcgtagatgcaagcaaaacactgggctagagactgtggatctgctcaggaacatggaggtagcttggtggctctcagcatgttgtccacaagggctaggctgctcctgcaacattaagtaaggctcctgttgggtattatcgggctccataacctttgctttccttagtaaatggtcctgtcctctctttcattccaacttgcaaccttcttaattaattggaagatgtgaatgaccaataacaataaaaagtggaaatgtaagtggactcagttcccataggaccatataacctctctgacaagctttataaatcctaccttcactttaagccaattttaactctgtggggggttttgcccacaaaatagttgtctgacagttaatacaaattaacaagagttgctaaaaaatgatgaaattagtttaccatgcttgggatagagttctgtctttcaaagggagtatttatttggaattacatgaaatacctaagagatagagtgctgatacaattttaggaaacaaatactcctgataatggtattttgaatgcacaactctcgggagtagtccagtaatccagtttcctcctctgtgtattgtatttgccaaatactgagttctcagtaaatattacataaacgcacaagttaattcctagtgacaagataatcaaaacctctagtcttcttgctttttgtggtgatgtgtgggtggctatggagcagagcaattgcagccttcaaacaagatctactagcatagtggtgcagatttggaaaggcattttctgtgtcgatttgagacttggctctggctgtagtttatctgtcatagatcatgggggagaggagaattctcccacagggaaatcagggtccagtcacatagcaactgaatacatccgtgactgggcgagaagtcattgctattttggtcacttccagatgtctgctattgtagttttaagggatggagaaagacatgtggcatgcccactgcacagcaggggaggtcatttctcttctaggactctcaactcatatttaaccatcactgtactcctcagatggatttgggaaagcttttgatattaaaattgagtttgctaatgcccatttacacacttgcttgcatgtgtagcaattggtgaatggaataaagcttgtgaataatcagcacccctcatgcaagcatcaaagaagatgctcccctattttggtatgatctactctttacaaagtgcaagctttgaacatctgttcaatgggacaggcactagatgagccagctgcccctagtaactattgtgctgacccagccagatgctctccattgtctaggtcttcttatgctattttcagggcctcttcttaactctcttatttgtgattctgaactatagatgttaggctataatccttacagacatagggacgaaaaatctctaaaaccttttcaaaaaaagatgtttagggtctttacagagagtccaagccaacaccagggatcatctctggttagactggtagattgtcttgcttctttctttccttgggaagatatagtactaacatgatccacatctttggagacaaagaaaccccgagaagtggatagctcagtattcacatgcatgcatgatatttgtgccatagctggctcatgttcagactatcatgtactagctgtgtgaatttggccagttacttaacttctaaaggttgagtttgtttacctgaaaactacatatctgggtagtagctactgaatattcatatgtgttagttgaagggcaatgttgtggtaaatgactccttcattatctaaccaagttgtgagctagccagaggaaaaaaaataaggctaagacagatgtgaaaaatgcagtatcatttatggaaaagtaggtttcacagccagaccttgcgtcaagacaggtgttcttttgcataagcagacaaagtcagtccatgctcccagaagggaagggtgaaattgcccttttatctcttgggctctaccctaagacttgtttcttctccatgagatgcagtgaggaacttgagaaaggctgggaatgttatacttagagaacttctacttatgaaagaaagatgaaggcgaggaaggatgtgtgactgagggctcactagatggctctgtgaggtgaaataaggtgttccgctgtgactaagttatcaacaaaatatattagctgatactgcagccctggcattcagtaatactcaccatactcattggatgaatgctccgttattggaaacagtcatttgctttcctgagttctcctacaccaatgttagtcttatcagaaatgcctccaatgacacccagaaactgattaatacaggatttctagagtcttaaccaccacagataggctttatttcttaagacaaaggatgaagatgcagacctatgtggtacagggtgggtgtgagggaggacacacttagcatgtcacagtcctcacatcccatccttgcctactaagtctgttgttatttagataagacatcaacaaccaagatcaaacatcctacagcagtcacaccttagaccattaggtcttatgactttaactttggaagaataatgacagtttgaactctctgaccttaagatgaaatggagccatctctgtgggcccccaacacctacctccattccctccttcttcactggtaggtcttctagtcctcccactgggttgatgtacatgacattaaagacagctcactggcttttgtaagaatttcaaaagtaactcacctgatttcaaggaaataccccaaactgtccaattgtttaacaaaataaaaatgtttagttaacatgttatggaaacaatgcttcaaggttgagtgtgaacccatgggagagaaaggtgatggtagagaaagtggcaccagaatacttcagtgttctgtgtgcaaagaggggcaaagagggggttatttggttgtctttgggggatgatcttacctgggaagacagtttttgggtaagatgttgtgcaagatgaaaatggctgttatgagggaatgctatcagtttgcctgaaggaacctcattgcttctaatatcatctcaccaggttatttttgctaagaagtatctgagacatagctctatggttaaggagggagagcagatttaattatggctgcagtgacaggaaatagacacccagtgaataatttaaagaggaacattccagagatgatctacatgcatattatgcaaattctttaaatgataccatgaagtttgttttgatgtttcactcaatggaccattcacagtaatagttgcatattggagcaagccaatgcttggttaatattttgtctgtttagaagtcactgaatttcagatagctgtcaacccatatgacaacggatatattaactctatggaacaaaacaataaggcttatgtcagactgtgacctcaatagaaattaatgtcattctattgttctttttaaagtccatcatttcctttgcattgctcttcataatatctgctaagcaagtggcattttgttggattttagggcctggcacagtactctgtcctcttttatggctactacgacaataaacgcaccattggatggctaaatttccggctacctctctcctacttcctggtggggattatgtgcattggatacagctttctggttgtcctcaaagcgtaagtttttaatatgatttctggaatcaactcaaatcattttgagaactggatataatattgatactattccatgtctagacaatagcaagtatgtaagagatgaatcagtgtggtcactctctgcagtacccccattggggggtcgtgtttgtggggctaccatcaaatgcagcagagtgtggattaagaaaggctagctaaagacgttaaaggaaaagacagacacagaataaaatcaggagggcagattcagtcaatactgaagtttatttttcaccattcttaaataccttaactaaaaaggaaacagtatcgtgtatatggaacaaacagacttttcttcctcaattctccaaggattcagtaactacaccttagatccaatttcttgttacctggtcttgagggtcaggagtaaccacacctcaggccaagtctgttgttatttagataagacacacaaggccaagatcaagatcaagcatcctactgcagccatgcctttgacctttaggtcttatgacttacttaggacagttttgaactttctgacctttagtcaagatccagtgaaagccatctttatgcaccctgacaaatcagcactgatgttagactattctatactaaaaccaaaaggttttgacataagcacaggcctttgggggctgtcctcagggttggaaggtggttacatgcagggctgggaatataatcagtggtaggtacttgcatatcatgtgcaagactctgagttcatggtatatcatcttgcctgtacttcaccatcctcttctaaaaaatggtggaaaagatctattgtaaattatctagctgaaaaaattagaaagtaaaataaaaagaaactactttgagcattccaggtagaaggtctttgtttggtaagttcaggactctcccagtttctgcatagagtttgaggttagtaatctcaaactaaaagtgatttgctcccaaatgtagctattctcatccaaataagttccataagctgaaaagtctggattttagcagcatacttcatatcaaactgctggaaaaagctgaataattcattggatgtatgcctaatgaggagcttattaatgccattctatccaagaaggctttaccaagacttcccagaaaggggtaaactaaactaaaaggcttcactcctaataatttagaaataaaggtaccagaccctcaatcatccccctcttttagcagtcatgacaggctacagaaaagacacacaggcctctgacacaaggaaactccagatcctctggcctccctgagcctagggccaaaactgaacacaaagaaactccagacaccccctagcctcctagatacttggttccttcaaactgtttggccacaaaagaaactccagaggagatcaaaaccttccctatcgtctccaggatacagttctgaaaactagccgtgaaaaccacagaatgttccctctcagcaccgactaacagaaaataattggtacacaggtatttcatgctaaaatatgactttgagaaattctcctgattgttcccaaatgtcaaccaataagaaaccaaccaatacctactgatataatcctgtaaattttgtctttaaaatctagcagtggacagggaatgtcactccctctggaagttgctatgacagctagccagacgtgtttcctgtcatggttggatgagcaatcaataaaaccttgcttttttagtttggtggatctgtctccatggtggtctctggggatctttgagactagggcacagcattccctaccacaaggttccctgacagagcacatattctcttctgttcataagcctggcagtaatgctatgcatagaatagactgaaatatccttcagtactttatgttgccatgtgtaagctttaaatgttttgtctacatatcctatcttacatgtatcataaaccaacatatatcattaactggtataagcataaacataaaaatattttttaattgggaaatttggcagtatccatatttcagaatctctaacaaaaaccgtaatttagacttaaaataatatttgcctaacacatgctatacatcatgacaaccactaactggtccttcattttttgtttcatttttggttttggttatgtttttttgagatggggactcaaatttactttttccagagtgatgggtgagaaacctgtaccagcatgccaggtttacatgttgctgaggattcaacacaaagtatcatgcatgctaggtgaacattatattaagctacatctccagtgaaaactactaccccttaaccattaaaaaattactataataccaatttacaggctattaaataaagagtactagagaccatgtgcccataggtctatttgaactcaaatttgtagatgaaaagtactctgctcaccctgctttccctctgtgttcttcatcttccataggaccaagttgttcctccagtgtgtcttgtgtagtgagtgaagatatatcagttgttcttgtggaacagatgaagagtttaagattcagcagttaggtgaccagccaaacttacttacagagccagaacagaattctgaacaccagcctctaactcatagttctcaacatatgggttacaatccctgatgggaggaagtgggcagagagaggtcaaatgaccctttcacaagggtcacctaagaccattggaaacacagatatttacattatgattcataacagtagcaaaattagtcataaggaagcaatgaaaataattttgtggttgggggtcactataacatgagaaactctgttaaagggttgcagcattaggaaggttgaggaccactgccctaacttcattcttgttttcctaatctcttagtaggactcattcatctcatgatgatgaagataaatctctagcctgttctgggtggcctttaataattttaaaatctatttaaaaactattctttgtgtgttataaaacccatttggaattaaattgccttgatatgactcttgtactaaatttttgctgttaaaaataaacttctcaaacataagtatattacaggacccatctattttctagatcacattagaatcaggggctggccacctcacacataattcccaaaggagtacaaatatttttacattctatttgaattgtcattatcccaaccacttttttttaacttcgtttgtatttatttaacaaaaatatctgtgactcaccccaaaccctgctaaatgtcttgcatatttcctgacattgaatcttagcatcaaatttgtgtatcttcctcctcgtttcccaacaaccaattaagtccccttttgtttaacaattctctcatatactcagaggggggaaaaaaaaaccctagaacccctcatgaacttcaagttaatattttacttgtctgcaatatttccactggagatgatactattcactgtttctaatgatgagattcagatcctaaagaatgccttggaaggctctgtggggccaacttattccaggaacacgacctcgcagcagatccagcacagcacacgactgtctcctcctcctcttcaaactgcagttggccctctttcaagagtgcttgggacagaagggcagtgatggatgaaaggtctaaagcctccatgttccatttcatgtcactgctttatgagctgtgtctagaattctgagattcaaaatgcaaaattctcttctaacaaacacagtccaggatgaatgacaaatattgacgaagtgaagatgacattgtcgaaagcttttataatgtcaaggacagaactggagcccaatcccatggcaagcatgtatacaaaaggctatttgtggtatatgtgtttattggcaaagcttttcgtggtgctaaatttactgctattcatttaaaaacaatgtatggtatctttacagtgagcaatctagagagctgtgtcgtgcctggagacttaatgatgagtaaaatgaggctctgcagtctcggggctcagcaagggaaatggactgtaggccaaggcatgaccagtgcttccggaaatggactgcaagcaaaggcacggccagtgcttctggcttcagtcctgccattatgtcttgcactgttttccaatctactctttgtctcagtttcctttgaagagcagagatcaggctgctttgtatgggccttaaaataatcccaccttctttctgcaggggatttattccgccactttctataggtattaaaatcatcagtgtgaagcagtttttgatcaccacagaatgagagaattaattgacaaacaaataaaatttagaaatcgaaattcctattgtctacttaatgtgaataacctgtttaaaatgtgacccagacattgcgttttcagtttatctgtgactgctgttttctatctcccatgtctgcctgaattacttttatctacatgctgtattaaactcctgcttttacaggatgaccaaaaatattggtgacgatgggggtggcgatgacaatactttcaacttcagctggaaggtattctgcagttgggactatctgattggtaaccctgaaacagctgacaacaaatttaattctatcacaatgaactttaaggtaaaggcacaaaccccaaagctcattttccttgggaagcattccatgtgaattgtcaaatattttgacaattaggagaaggatgctcttatcactgctgcctactatgatgtggacatgagtctgattatgacagaaatagcctgtgacccgtaacagctgtattttttcttcaggacttttcttctgaaaatttagtaataaaacactgctatttggttgaaataggagttcactggttatcagaatcagatagttcaaataatgtgacagtactcactagctatttgcagaaacatgtaggctcagtaagcaaattgattctaaagcattacagcatagctttaaagcaatactgaaagagcagggcatggtttcatacacctataaccccaggatttgggagattggaggcaagaggattgggaatttaagtacagtctcacccataaagtgagtttgaagccagcataagctacaagaaattgtttcataaaagcaaagcccccacctcctgtaaaaattaaatactagaagtaacttttagaatgatgcttctcctagttttaggatttacaagagtctcatgtagcccaggtcagcctcaagcttgctatgtagcacatgctaaccccaaacttacccatcctcctgcctctaccaattcactgactgtcctgttctgttgttattcagccactttatggaattttagattaagttcacagttttgttccttgtttttctcaattcatagtctttttcacagcagtgtttctcttgcgttctgtttttgcctggctgcaggaagccatcatagaagaaagagcagctcaggtggaggagaacatccacctcatcagattcctgaggtttcttgctaacttcttcgtgttcctaacacttggtgcaagtggatacctcatcttttgggctgtgaagcgatcccaggaatttgcacagcaagatcctgacacccttgggtggtgggaaaaaaatgaagttcgtctcggcatgcctttaacatgcttagaaactcatacttgctattttgtggtctgtgtttctgcagttgaacttgagacaaggctgcttcctgtctagtgctctagtccattctcctgcttacccaccaccctgctcatttctcaccgtcttcctgtccttgtttccaaatctgtgctgttggattttcaatctatgtcacgatggaaagttagaacaggaagagagaagaaaatattttatagagggaagggtgaatcttaggagacaatataacaggcaaagttaggaaaaccaggctgacagccttgatgttttatttcgactctaaaactcttcctacaatccaatattgctttcttggaagatgtcactcctacaactaaaatgccagattcctgattagtttgtccttagttcctttacttaccttataagaagcactcagattgcctgcttaattgcatttccaggcttttcacaggaatctcagtgaaacatctccatctctttcctgccaaagtttttgttcctcagctattcaaatgaggaaggccagctctggaccagatttgcctgcagagaatctgcccaattagtgtgtaggagagaggtgattagaatacagatttcgaatcaggaaataattggtcctgagttattgctagagtctgtggtacataaaatattttcacataccacacaacatcaatttgaacttggcaattgtcaaagcatgtgtagatttatgctatggggatatttaggcatcccagatggaaacttctgcaaagctctgtagatggaagaattttgagatgactcttcataagtgtatgatttcttagaaatatcttggctggcaagtgattcagtagaaatataaaaaatgcctctacataaaaacagtataaaagcttcagaagtgataacagcagaaacgaaccacacgttcagggttaacagtatcacagttgttccatggaaacctgtaaagtggaggttattaaataaagggattttttttttctccaaaaggacaaaaatagcacaaagcatttatcaagtttgttttcaaaatactctcataatgttgatagtataagaaaaatgttcattcagctttggcccatggaacaatggtcatattttaatataaatgaatctactacatgacgaatggttgcttatcattaacttcttgccatcactctggggagagaaagttactgagtttgaagccacctggactatgcagtgaattccaggccagcctacctcaatatcctgaaaagaataactctttgtaagaactgttgaatatctcttttagaggaaccctgagctttaaatacaaatggagatgataatggcgactcagaaataactccatatgtctactgaaacaaaagcgaagttgtctttataattgtacagatgctgctaaatttttaggttctgttgagaatatttcatgctgattttatatcatgctgagttgttcatcctcttgatcattctaatagggtgttcttagtaaacactttaaaattagccattgtaaccttaatatgttctggtagttctaatcattcaaaatacagagggtgccgggggaaataaaaataaaatgtttagtgctgacagtctgagccaggtatttagagatcgagtagcaggagttacttccagtctgttcctctttacttcataaaatgccatgcatcagcatatcacagtcagtaaccccatagaacagtgtgttctctgggcagagagatagaaattgtgcactcactataccaaggaaacatgattatgggcacgtctacaagctcatatatatagcttgtaaatacaagttgaatattgtgtttgctgttttattgagatcaaatactaaaaatgcatggcataatctgttttataaaatatcaaaggaccctagctgaacatcttcccaacttctggaaggaagcagtaataatggaaacatcctgatccctgtgtctccttgtagatgaacatggttatgtccctcctggggatgttctgtcccacactgtttgacttatttgctgaattggaagattaccatcctctcattgctctgaagtggctcctggggcgcatttttgctcttcttctaggcaacttgtatgtatttattcttgccttgatggatgagattaacaacaaggtgagccttgtgtgtggatcgtccttgtcatcagcatgatgatttcccagtttggagatgaccagggatgcctttgaaactgtgctgtgtgattttcctgtctacttctttgattcctagattgaagaggagaagcatgtgaaggccaatattaccctgtgggaagccaacatgattaaggcttacaatgaatcactctctgggaacaccacaggaccacccttttttgttcatcctgcagatgtaccccgaggaccctgctgggaaacaatggtgggacaggtaacattatgaagaaaagtgtatgctgttagtggaccaaataatctgaatacttcctccaaactaaggtctttttgtttattgtttattaataaaaatagagacagttgattgaatatttagcatttgctggctctgaatttcaaacgtattaactcagggagacttcacatccatcccctgagataaacacattttctgtttacagcacctttatagctgtgtatgaaaggatagcttacaatcatgtgaagatatgcctgccagctattatattctaacaaagcacccaaatttagatgcagactcaaatagtgcttatgtggaaccttaagttgtattatttgtttttataaaaaaagatctagtggctttatgataacaatttttatctaatgattttcccttaagccttaaaagaaatgctattttaagttatttgtttttatatggttatgtaaatgaccctagtctaactaaggctagtgatattttaccagataaaagaaataaggccccattgcttaccatccaataaagggaaacaaaaccaaacaaaaacaaccagagatgctgtttcagactctcccatttctgtatagattctatttatgttttgtgaagcttgtaattttatctcattggagaaaacactcttaatgtgcattcaactttagttcatcaagtgcagacaaattcaagtaaactgtagtgtttctagtacagagcagttcagccatatcagtcatgtagtctctgtgaattaactggacagatttttagaattgtattttctgtaggatgagaatatcaatgtattagcacaagtcttactcaagtaatgcaaatgtggactcaaaagacaccttcaccctcagtctgatgttcatgaggttaagccattgtgatttcaattatgtatatatatgcacacacaacactagaattgtgtggctggaggtggaataaagaataaatagtctaataaatttgctttatttactttttaagtatttgaggaatttgaggatcagataaattcatttcttagtgtatgctgctagattttcagaacttaacacatcatatatgcttttagaaacatccatgaataagaaaataaaggcctgtttgcttttaaaagagagatactgtggacctcggtgtggtaggcagagcaagggccctccaactgttcacctgtgagtctcttccttacttggcaaaaatggactttacacatgtaggagcttagcaagatgaacggccctgaagtatgctgagtgagtctaataaagttacaaggggtctctctaaagagagacacaggggcaaagtcagagaattgagatatgaccaaggaagcagaggttggagtgatgttctttagagatggaggaatagccaaaggagtgtagaccagctttaagagtcagaaacttagggaagcagattgtccccatgtctacactttgattctagacttctgactttcagaaccacgagaaaatagttgtattattttaatctacagagtctgtgacagtctgttctatcaggaacagacagacacttgtgggatcacatctcagttctctgtgtgaagtatgttctcaggatcatcagaattaactgtaaagagtaataagatacgggatggccattggacatgaggtatcactctaagagaaatttatattcctggtgcagaagcttctgtgatagtcctccatcgtgttgactcataataatacagaaagcatgtatttaattctccctctctaaggcaccagaacacactgcatgtcccggaacatgtgtgctgtgtgctgtttttggaattatatctgtagtgagtttcccatttcatcattgttccttactgccaatctctccttacttcctccagtatgctaagggacaccacctctccccctgctggctctgctgacattcccataagtgtttgatacccccttggggaaagaaaggcagaaaagaagggaaatatagaatgctgactaggtcgatggaatctgggagagtgaaggtaacttggatacaacagctttgagtactggaaaacagggcccttgtgatatcagtatctccattcttgtatctggaaatatttctatcctttagactctgaaaaatgaagaaataataaaggcagctgattttatgtaattatgaagatgtaccctaaagttcgtaattccatgagaacattccagatgtttgcttttccttttcatgaatgccttacattttgttctctttccacaatgctgtgtcactcaaagctctcttggttcaaacaaacaaacaaacaaacaaacaaacaaacaaacccccaaaacaaccaaacattgaattggctttcctttaagctgtatagtgtttctcaaatagtaatttattgcagtggtatttgaaagacaaacagcagaacctttcctgtggagtaagtaggtacatgaagccatggctgacactgtgtttggaaggataaaaaaccaagtgctaaggaccacactgagaatgggtaacactgatggccatctaatgtgccaagtattcacttcttgaaattttaagtcaccaatgcgagagctacccgagaatcaatactctatagatgagaatactgagagacagatttgctcaagaccttacagaagtcaacggcaggagctaaatttcatccacacagtgggattacagagctcgaatctttattcagtgttgtattatctccacgggacacaattatcactaagcatagcctcttggcttctgcacacatgtgccccttcatgctgtctgcatacatgtgccatttcatgctgtctgcatacacgtgccccttcatgctgtctgcatacatgtgccccttcatgctgtctgcataaatgtgccctttatgctgtttttacagattgttttgccttgaccctttgctgactcttttgggtttacagaacaaagctatccagacatttcaactacatgccctggagtaatgttgtgagctgtgaggctatcctcaggagactttgtccagggtgccaggaagtgagtctggaggacgttcctgagccactcttgcaggggattctcttttctctacagcagcgcatctcttctgtgatctgtgaattgatacttaccatttatactaccatcttcagatcctccttgtggattttaagtaaaatgccataccgtggggaagaataatgcttcagacattgggcgatgacccttacttaaggaagcatgagagactttctaacagctctgaaattttctcttctcaggaaatcttcccaggctatctgaggaaacaaaacaaaacaaaaaaattgcccactaatctatctctagaccatgttgctagggccttaacattgaccagggactaaaactgagaatgagaacaaggaaaagaaaggttgcattcctgaataaccaggagttactagcacatattcactcattccatatttgcttaatggctgttacatacccacaattgttggattctaaggatatggaggccccctttgtgaaaatcacagtctattacagagagaggcaaggccagtaaccttataattataaaaggctttcagatacacattgtcaatgagacagataaaatgcatggaatctgagtgcttctttttacagtgcttatctggctaagggaacaaaggaagcttgcctcagtcatgctatgacaatgtttgtcagatggtacaaactgagtcaggaggtgagttaggtgaagttgatagaggaagactataggcagggctgagtaccctgaaaaagtacagagtttgatggtctgaaagaaggccagtgagactgcaaaggaaaaacacaggaacaatataagaataacatagagagctgtatgcagagccccatacaaggatggggaacttgttacgataaatctttctgctataagccatcgagccccacagccacgtgtgtgctctatgccagccgcccacctgagttagggccccaattaatgcacagagagacttgtattaggttcaaagctgcttggccaatgactaggattctcatctgtcagctcagtcttaattatcataaatctatatatgttttaagacttatctttagaggatgcctttcgctggcaccctctcttgccggtggctcacatggcactgctggaggaggaaggggaaaagggggacacttctgtttttccttgctaaatataagtctctttgctatgtcacttccggcctggatcaccacttctctactacatttcccagaatcctctttgacttctagtcctgtctaacttgctgtctcattggccaaacagtgttttattcaataatcaataagataaacatacaaagaagtacattccccatcaggaactgtgtggcccagagatgagaggttttaaaatacctatgggcaaagactttctttcctttccctcatttttttctgtctatttgtctgctttgaggtcaaaatgttctgctgcttacaggcctttgtgatgggttactttgcaagggaattaatgctaaaataacttttaaaaatacatactaagctttcaataatcttttgtttttattgtatttgcattatagttaacttatgcataaggtagttgatggatatattttattttaatacattataaaataaatatcagttactaatacttcatatggtactcagtcatggcaaggaaggtgatggtggctggtgataccaggagtttaggaggcacaactctgaagcacgagtctggaaattcacagatgactttgtcaattgcctacttgctctatgagtcaatgtactcattagtagaaaggagactgtctagatggatggaagtcaaaaattcaaagggctttttacagaatagtggtacttcttttcttattttcttttccttaagacaggaactcatggaccccaggctagatgtgaatttactgtgtagctgaggatggccttgaacttcaaatcttcctgcctctgtctcctgagtgctagggttactggttccagcactgctggttaacacagctctgggggtcaaactcagtgttttgtacatgccaggtgaacactccatcagatgagctgtatccccatccttgaccaacagcacctctgcaaaattatgacattttcattcagtgtttttagtattcagggtacaaattattggagagaaacagaaaaggaacagcagaaattaactatgatgaggaaaatatataattatttgccattttttttattaatgcgtattctcatttatttccacacggtaatagtgactttcctgtccaactcacaactacacatactttgcatttaaattcaaacccataccacagaagtgactttacctttccacaacttttattttctcatatacatatgtatttacatatatgtcatatataatcatacatgcatacatgcatgagtgggtattttgttaaaaatcagttcattctacatacatatcttattctacacatttttaaaagcttgtgttgaaaacaaggtttttggtttttaataaagcactattgttctttgaatgtgaagtacactccataaactcatgtgtttgagcactcgattgtaagctgtttgaaaggtggtagactctttaggagatagaaccaagctggagaaagtgggtcactggggggaggtctgtggtagggttagcctgaacccactgatgttcattctttgctttctcgcagtgttagtagtgtgaccagctatctcacacttacgccactatgctttcctggttaatggactgtatccccttaaactgtaagctaaaggaaaccctcctctcttatgcagcttctggtcatgaatttggccgacctcaaggaaagtaactaatcccagggcttttaaagcaacctcactgaagtttcttccatgtaccatatacactttacactgccaaagcaattcaatgccagaatcaaacctaaaatctatgcatgattgtttttccatctgcttttaaatttcagtgtcataaagtttctcggtaaaaagaagaagctggtatagagacttgaggatgcagctgcttagcttaagagtaacaaaatacaggggagtgattttccatttactagatatgcctacttatttgtccttttatcattagctatagtcttcaagccagtgacctagaaacatgacagttttgatatcaatattggggtcttctgaagacagaaatgtgttcattaataaagactgtttcataccaggagtttgtgcggctcaccgtttctgatgttctgaccacttatgtcacgatcctcattggtgacttcctcagagcgtgctttgtgaggttttgcaattactgctggtgctgggatttggaatatggatatgtaagtatggtgctgactcctcccttatcaaatttctcctctgtgattcatcatttacacacactccacaagtggaagggtgccttagagttacatgagtgaggtcaccttgtgagatggcaataaacaaagattcagcagtacagttttatgtaacaaatgcttctctgtcctgccagccagctcccaaataatgacacttccaaaataatgagacttcttattatgaaagctcagccaaacacttagacttgttcctaaccagctcttataacttaaactaacccattgatttttaatctatgttttaccatgtggtgttacccctcttctatcttaaaccttctatttcctctctgtgtcttccggtgtctgtctctgtgtgattccttctcctttctctctctgcctgaaagtcccacttaccctccagcttagctattggccatttagctttcattaaaacaatcacagtgacacatctttacacagtgtaattaaacattttgcaacagttataactcagaagagctcatatttgagcatcatggattctaatactgaagtaaagttagctttgactccttaaaataatggctctctgtggcgatatgctgtttatgatttaataaagctttccaggagatcagaatgcaaagctaaccacagccatagaggccaggcagtggtggtggtacacagctttaatcccagcagccatactagttagccatagaagctgggaagtggtagtacacgcctttgatcccagcactagagaggtatataagacagcacaggttctcagagctgacaattagtctctagctacattgaggacacgatcactccaaccttgggagaggtaagagctctctggtggtttggctgctttgtttttctgatcttcagcttgaactcccatatctgtgagtttatattatttgtgtcacagcctttgaactgtcagaatgttgaaggaaaccttggtccaatggtcagttcacttcccatgaagccagttggaactgatacatgattgctgtaaactgtatactctttatattcctgtgggttttgctgtaggactgggaaattatcacgtgatagttactacgtagtacatgagggaatgaaaggattcagtgaagatggcgtttactttatgacgttcactgactaacacaggcctgacagacacaacagcggggaactgtggagatttcaaggaagacacaatttgctgacagggctttgctgaagcggagcccagcagcatcctgaaacaatagctcaggcttctctgaacctctctgatgttaatttatcaccagctttccctctgtgcccaggttaaaatctccctaaacttagggaagtggcagagcacacatggttcttggtctgacatgtcaacaggtctccgttgcccatttgtacaaataaaatcagtttcagttaatccatagaaatgcaagttgcagaactggtggcacccctgtgtttaagccctccatggctttgtgagcaccctgaatgtgctaccttcctaggactctcaggctatcaaagagtttgttgcttttcttgctgcctgcccctaattgctgcattataattttcacacatatggaactttaaaaattttcaaacagaaaaaaaggttttttttcatttgcacttaactatttatccctcaaagggatactggtaccctagaactgggtatggccatttctttcttgtcattaaacatcccttcagtaggccacctcctcagagttctcagaccaccattctaacatagcccatctaatgctatggcaacttgacttttgatttatgaacaagatgtacagctactggacatttctttttaaactgcttattacccattgcccctcacggggaggaatgcacgaagaaaaatttcttgtttgaatcaggctagtcacatggcaaatgctttctgttgactgtatggatgaacttgtacctaaacatcctgataccaccagggcagcactggcagccggaagaactctgcctcttagttgcctgggcccacagagttgttgtggttgtgtgttctaagccagcaatggttctcttccaaccagtgaagaaatagttggcacgggggatctcacttctatctcatgctttcttgtatctagactaagggcacattcaagattctgggttacatcttttggctatctgactttgagacagtgctttttattagatcatctctgacaccctcacttaaggtgcccctcagatgaggcaaaagcacttaggtaatgctctctggttcatgtctgtgaggtaatgcagcagagcccggatgcccctgtacagctctcctattgcttgttatgaggtattcatctggcttagattcatttctattttccctgcctgattcagctcttcagaggcagacacaaaaattgcatctctttcttagatcatggcttgtcttttgtttgccttttatcccttgctgctttcttcttaagtggtagaaaagttgactatgaatatgaagtcaatataacatgacctggatgcataaaagctgtaattaaatgactataatttattatttattgagtgctgacagagcgcttgggttagtacaaagtacaggaaataggtttctgttttttgagtcataaagaaagaattctctcttattttacctttgtaaggttctttgaaggaaagctcaaaatcaaaacaagttataaaatgttaatgttggatgacgtatctttcttatggattatttcatcctgccagttgactgactgacttccttggaagcctgctggtgctggccactatgagcaaacccatgtaaggtactgaggggcatagaggagatgaggctactggaacccacagagaataggaagcttggacctgaaatattgattttaatttgcttgcctaatgtttggatatttttaatgaactaaagctttttaaactgggaacttctgcataatacattttctttgttgacatattagaaaacttgtccatattagactcatattcccaattggaaaaaaacagacagaaacagtcaccttcaaccattaggatattcattcttcaattctacaaataccactacccttaccttgcaagctgtaagaattaagaaagtcaaaaaaggtaattagcaaaggacagatgaattgttcatggactgtggagtatacatgagggaagacagaaaataagaggggggggaagggggagagatgtatgctcagaggagacatttgagttgatcttgtagaatgagtcgaatttcaagagatgaagaagacatttcctggaagggacaaatgagacaggaccccagagatgaacactgcagtgtttctctgctcttgctttagatttgctaattgataagttggtccagaaagcacttaccatgaaggaaagaaaaacttgagatgaggtgaggagagattcccaaatatcttgagaaaatagagagaaactgtatccttttgccataaaaaatatagcatttctttgtttcttggaatttcaaaaatatcgtgagatttttgtagaaaaattgtagtaaaatacaataaagttaatataaaagtaaaaattctagataattctaccagtagtgagaacatttatattatcagaatcaaataatcttaatgttacacatatgtacataaacattatgttttaagatgtcccattatagattacataagtgtatttatgtatgtatgtatacatgtgttctgtacgtggacaggtaatctatatgcctatttttgagcacctcactggctttgtcatcacaacttcatgttactgctagattatagcatgctattatttgtgagctgggggctgagcccaaggccttgctcatgctaacttgtgctctaccacttagccaaaaccttaaccttctataatataaattcatttttattaacatagattagctgtacaaaacaatcagatttgctatgatattttaagatagcatataatatacattttatcatagtcatcctttgtttattctcctcccatttccccttcaacaccttaattgtccaaattttaattttatgtccatttcaggctttcagacattgcataatgatagaaaacattcaattactatttttatgagtcttagtatattttcatcacaatgatctgcctttcatcattttttccacaagtgatataattttgttcttttaaaatatgatttttaatggttatatattctacatctagatttagaaaaaattgcagtagtttatttgttgtcagttgaactgtatctgtttttgttaagataactatcatggtgatcttcggctatattaatagaggtaaacatcatcatatatgtatcatagtggtgcacatgaatttgttccttacaatgtatttccctaagctggtttgcttggatagataaaaggtgccttttttctctttcattctattttattgtatttttgttattgctcacaagttcaataaagaatgtcttaacctaacatttttccattcatctatttagctcataaataaagtcatgtacaattatgatacagaatacagtatgttcacaatggcatggctaaattaaaccaattaacatgttgtatcacacatattcatcattttttgttttgagaacacttaaagtatactatctcacaacttttaaaatatagcatattttaacctaacatttaatttacactgacagcaggcttagtgttcatcaacaaaaagaatcaagggtatttgaaaagatgtaggattgtatgccagcatgtgtgaacaaatccaccttctttatacttgtatttttaatctttgctacatttaatctttgctacattaatacaaattagaacccatgagagatttccttgagatctgatgaagaggctcaagattattcataaatatgcatgatagtcagaccatctgagtggagtcctaataattcagccttctgtaacattctattcttaatttcctatgtatcagaagtgttacaaatagtttatatttgtaagttatgttttcattccatgttaaaaaaaaacaatgctgtgaacttggtattattcccactccataataaaccaaggcttaaagactgttaagccaatggcatatagctaggtaatggtagagttacaattagaactcctatctaatttacttcaaagccattaaccacatttataacacatggaatgttcactgtcactcaggatatctaaatactgccaaaaactaaatgcaatatatggccttttaaacttccagtgctcgctggattcgacattacattcagtagaatggagtaaacttgaatgaataaagggcacaagatagaagatatgggcaagtatgagattgccatccaaaagatagcatgatacagaggcagtaagaagacgtgggcatgccacaatggatcaagaattaatatggagaccctacagaacaggctttagatgacgttgccctctggatgtggagagagtcaatctgcaggatcctacttctcagctgggctgaagggcaaaacctcgagggctgaatcatcctggtagatgaagctaaagcttatccaagagctgcggttctcaaatttatcagaaactatcagagtccacagagggcctgggagaatttagcagttctatttagtagctccggggcagggccccagaattaacttttctttccagctccttggtgacctggtgactccagtctggagaccacacacaggcaccactgctctggagtcacagcccaggcttagcctgcagcaccgagtggagtggtacagccgtgggaattgggaattgtgtggaaacagccaggcgggtccttgcaaaggcagaatatattggctctgaggtcctgattgcatttcctaacatctggatggtggcattctgctccacacaactcaatttttcagggacacaatggatttccccaggaagtttgtccagtgagccatataccttccctagatagatgtctgattctagcccactgtaaagtccaatatatatatatatatgacttctattcctcagttcctatcctctgaccaaatccaagtgagtccttctgttgctggaactgtaggcagggtgaggggccacagatgaacttcttacactacactcattacattatctcaggtttcaaggaaacatgcatattttcccccattctcatgcactatttaatttttaatgcattgtttttcctacttcagaggcaattaaatatattgcaaattaacttccatttggtgaatatttttgatactttaaatataatataatctcatggtttcaaaaagcttccctctaaaagaatgaacactggctcatacatatctacataactttgtgtggcatttttagagtggagtgttatgtatttactacatagcatatcgaatttcatttgtaaagggtttacagagaaacaatttttttaaacaactgggccaataagctctgttttaattcaaatctgggggaagacaatgcaggagggggagtaggtgcagctttattctaataaaaaaccacttacaaaagcaaaaggccatccatcttcagtttatgggctgtaacatgctgactccagacctatttcatttcattgatttatctgtgcagaaaatggatcctcaagagacaagtgactggcctagctcgcgtactcaggaaatgttcgggcagagcttactactcaaatgtaaattcaatgtctgtacagaagtcaacagggcacagaggacacccttgcaatctcactgtttcctgtcagtttagaaaaataacactttattcctttagatacttctgctgtgctggagaggccaggagattcccagtatgtcccttgtgctttcttttttaaagtatttatttatttatttatttatttttattttatatggatgtgtgagtacctacatgcttgaatgtgcaatacatgtgtattagtaaccacagaagccagaaagatgttggatctcttagaactgcagttacaggtatttatgggtgctgagaactgaactgaggtcctttgcaacaagtgttcttgaccactgagctgtctctccggctcttccttttccagtcagctagttaggtgtccaatatctctttcaaaatgactttgtggaagaataaaagaataagaacttaaagggttgaattgaagccatgtcccatacttggctaattcctgatatcaaaagaggtagcagttgaagctttgagtcttgaaatggcagcaagaagctgttccaggccacagatggtgcagaccacccaatgcagcagttttcaaatgtgttttgggatctcacagactctgggcaaaaatcaagctccaggcaaaaggcttcaacagcataggacagagctctccagtgaatggagagttctggagctcatattgtccagctagaggaagttcttgctttcttcccctgttcacctctccctcctttcctccttccttcccccttctccctccctcccacttttctccctccctttctgcttccctcccttccttccttccactcatcccccccactttttcatcaatctatacagggtctggcctctgacttgctgtgtagctgagagcgatcttgaactttctgaatctcctgcctccacctcccaaatgttcagattgcaggcatgcaccaccatccctgttctgttctggggctggggttttgtgtgtgtcaggtgagtgctctatcacctaagttagatctctcttcccatagacttttgaggtgaaggacactttttgttgttgattttataacctaagttttaggataatccttttgtatactgtgaacattacacttccagaaaaaacttcagactcaatactctagcactgtcttgaataagtttatattgatattttctaggtcatctttgtccttactgaacacacagggctgttcttcattataccttatcttactattatatcttgcttaagcattattattctgtcacgtttgctgtttatgccctggatctgtttcaagatagattctccacatttttaaattgtgaaggcaaaatagtatcttcttacatgtgcctcctgacataatttaagtaagttctttgacaatttcaaatgtgtatgtaatacattctctccttccaccctttgatttccatcctgccctgagttcttaggcataaataaaattgagattctcttgtcatcgtggtatgcttatgtatatgtgcccatgtgttgtatgtacatatgtgtacatgtatgtgtgtatgtgcatgtgtgtatgagtatgattatttgtgtatgtatgtatgcatgctaatatatgtgtgtatatttatgtgtatatatgtatatgtgttgagacatggggctgttactgtgtatatttatgtgtatatatgtatgtgtatatatgtgttgaggcatggggctgttactgtgtgtatttatgtgtatatatgtatgtgtatatatgtgttgaagcatggggctgttactgtgtgtatttatgtgtatatatgtatgtgtatatatgtgttgaggcatggggctgttactgggactgaagatcacaggaaccttccactctccacgtttctctaatgcaatcttcttggccatcttaattcctatgctctatctcaaattaagaaggagctgattgtattgtccgtgctaattaggatgaagttcattgatttagaagctttcctactaggatagctaatgtatgatcaggaagtctttggatgggctgcccttggacaaggacctattgcagtactattgggggacctcttaaaagcagcttggagctgctgccctgggctggacaggattgcttatgccatggtaattgagcatttactttagtagttcctgcattttttatatttctttttctatatttacttttctataaagttaattcacatttttgaaaaatgttaaatacacaaaattctgtgtcactcccatttcctgatgacgcactggtccttttttctacttacagttccacataggatttcttaaaaaatagtacatgaataaactaaatagtagactattacacacttttgtttaacattagagcatggttttcactgatataatagacttccaaactgttcaaagttatcagcaatggtatatcatggtacaagtatattgtatgtatttaaagttggccacataaatggtttcatcatttcttgttaaaatttatcagcatttcagataacattgttcagacaaattcctacaagtagacttaccagatcaaagaaagtgagatttcgaaagccttaaaatgtactgtcaagctgtttctaatgaaaagatgtaattttttgtcatcaggtagaagacagtgccctgccatattccataatttcacttggggatgtcacacacataccatgggtacatgtgttgagatcagagaacaagttgagaggttttttttttttttctttttccaccatgtgggcctcaagattaaaagtcaattgtcatgcttggcagcaagcaccctttaccactaaagccattttatcagccccacaactggtttttaaaatgagtctttgtgtgttgaaaagtattacatccttcttgttttatgtattctagtcattattctgctactgtcgttgaagggcaagtagtagacttaggtacattgatgtgaaagcacttactgcttgctttcagttggaaatactaactcagtgtgtgtgtgtgttttctttagccttcatatacagaatttgacatcagtggcaatgtcctcgctctgatcttcaaccaaggcatgatctggtatgtcagctgttgaacatttttgagcatgtagggaaaagtctccaaggtcattgttgtaaaaggaaatgctggtaggtatagagaagaccccattctgtggattccagctcattatttttctagggagagatgagtggtgtagatagcttgatttttccatatttcagtcatgagcctgtctggcagagttctccttcattaaaaattgtgagtctatgctctttctgctggattgatttgaagattctcttcttacatcctgtcacaccaggattgaacaggaaacaatcactcatcaatggtcaatcacattagctcctgtaaggaatgagatatgctgttgtacatggcttttgaaaaaaccgataacattttcttgtcactattcaacatactaaaagcatatttgataactactaaaaaaatcttaccatacccagcagcttatagaactagatacaacacatattttaggaagtgcaagttagaaataagatcttcactttgtaatgtgccgagtagggccatttgcacaagggaatttttattttgatgtgaaaagattgtcatctcttctattaagtggaagcattttcactataaattctgacaggttatgataagttgatagagtgaaaaccagttttgagttttaaaaattgaatcacagcatgaaattcatctggggatgatgtgtcttagaatctgtcactctctgtgagcataccaacccacaggcagttacagtgaagctgctctttcttcctggggacatgtgctgaagactgactacaccattgtcctatcataggtgccaagatagtttcagctggtgttttctttttttaaaattaattttatatatcattcaaatctttcaatcaggctcattagacccattgtatgctgatagagcctggcaccctcttcagaaatgaaaaccattttgcttcagaaatgaaaaccaatagcataaggacctttccaagcctccatcattacaccaatggggcctattggatttatgcttccataggtgaaccagtgcaaataatacaaaaaatacatttattttggttgtcaagtcagaatggttaagaatgcaatttctgtcccctcccttgctttctactttttgtaaatatggctcctgtatcctgagtgttgctaaggactagaacacatcctttattcttcatgtatggaagaatgacgaggtataacctgagggttacaggcccaagagagtgagggagcagctccaatgagttctaatccttcacctcccagaggagaagcatcttccatggcagaaagtgggcatcacagctactggagtggtgcaaaacctcatcctcctgcccatggtatccttacagtgctatcaatgcctctggactgctgatgccatcagtgcaggcttatgccaaatgtctattgtattctttcagagctaacagaatagatttgtctagaattcacttttattgtcagaaaagccattgtaattgctaccctgattgattttgcttgtaattttatgactagtctgccattgttcatactacaatactgagaaaatgtaattgtttttacagtttgttaatggacagaaagctgcatgcttgaaatctctgtattgccactttgggttcattcttttacactgctcaggctcacttctggggaatttgagtaggactttaggtacaagagtatataattttagggaagtctagattttaaattacatactaaattttgtttagagtcaagtaggctatgcatacatgaaacagatccctccctccagatctttacaagtcaggaagtgatttgtgttttgtgcatataacaaagaaacacacattctgagtttcagaggcagcatacctattaatctattatttagcacaagggcagtattttgcatggatattctttgcctaacttccaggcagttggtgagggtttgagaatgtggtgtggtaggaaggtgtggggatggtaacatgttagaatagtagattgtttccacacagggtcacacacaccatgattctgttagtctataaacatgaggtgctggtgcctattaggtattttctattaaaataatcaaaacatgatagggatttttatgttccactacagatattcaattattgctttaagagttgctgaagattgtagattacttacacagatatcattaaagtgaaagcatttgttgtgatttaacttaatgatcaataaacctttatttgctctcttagtttaaatctaaataccatacatttgtgtaacacgaaatgggaaaagcacatgctatttttaaaagagcagaatataaaggagcagtaaatattaaacaatgacctgtcatcaccctctcccctaattttctcagttgttcagggttgagtaatttatctgatacatgtgtggccctggagcaacaaggagggtcaaataaaaaatgcttccctttgcttttatcatctgaggagaaagttgtgttatgaagctaagatggtataatgattttttttagccgacagatgatggcattaggtctgggtaaggggcttagtgggatgaactgattgtaagtcacaaaccaagactcaggcattattgtggtgggacttgtttttctaggttatgcctttcaagtcatacactcatcatgtctatgattattttgaaattgttgtacacctactgtattactcagggttttctaaggaacagagctaatagaatgagatacatatatgtgtgatttttagaggggcttgcgggctgtgctctgagtaatccagcaatggctttctcctgacagaaaggccaaagttctggttatagttcagacatctcagcagtcccaatctggtgctggagtctcattgatattctatacaacttcaagttttaggttaatgttgggattctaaagaagtgggttctaacaacagggaagggatacctcaggatagatgcacttgccaatgagatcaagggcaagcagacagaaagtacaagctttgttcttccatgtccttttatgtaggctgccaccagaaggtgtggctcagatttttggtggatcttctgatgtcaaatgatgtagatttaggctgggtctcccagttctaataatccaaccaagaaaaatccttcacatgtatgccaagttgcttgggtcttggttactttcaaatgcagtcaagctgacaaccaagattagtcatcaaaaatccacttcttgtcaagttgacacataatcatatctccttatgccatgcttaacttgcaaatgaaaacaataatcaagtcataatcatgcctaacataactatcccacattgacacaaatgcattatagaggaaggggcaatatcctttaatggacattcttctagtcttataaatcacttacataaagcattcatatcatgtaactccacatgcacatagagggaggtagttttagaaaaatctagattttgatttgtgtgtcaaattttgtcttggactcaggttgtacataaatgaaacagaacccctcttaccttcacaatttagagaaataaaatatctcgtgtgggttgagggagaactctgatcccatgccttattcttactttagagatgcttactgatggaatagcctctacctggaacattgctctcagggcagttggaagagaaggacataaaaaccacatagaactggtaaagttttcaaccagtgctgatgtatcttaatgtaataatcttttattggtccaaacaagtcacaaatgcaaccctgagttttagaacaaagtggacctgatcagccccatgtactaagctttgcaatttgaattaactgggacaattggtaacatattatttttttgaatgccaacttctatcttgctagttatacagtgatgtgtatcaaaggtacatagtgaagttttaaaatctatcttcccattaaaaaataactacttacaaagtttacagtctgttcactatgacgtcattcagatgtgttgtttagcgccctcaaacaggataatttaaattgtggcaagatttcacttttcaaaggaaagaattaactttaggatggctcatgtgcagtgagataatttcattttccctgcttaaaaaatgtctctttagtatacaaaattttcattggcttagtttcttagtttttctccctattatgattgaaataccctgacaaaagaaatttgtaggaccaatgacaaattatatttcacagttccaggtgacataccatcatatcagggatgtcaaggtatcaggaacttgaaaaaaaatctagtcatattccatctataatacatagcagagaacaatgaatgaatacataaatacatatgcttattttagttcaagattctttgcctagggaatggcgccacccatagtgggaaggtctttccaatgtaatgtaatcaagataattcctcacagatctacccacaagtcagcctgatttaaacaatctctcattgatattctttccccagctgatactaacttgtgtcagggagacaattaaaagttaccacagttagttaaacagttactatgtgcacttagaaaatacaaagtgttcaactaaagttctgaatgcttttttatagttgggacaatttaaaaaatggggctgtactttatttatgaaatatgtacagcgttctttcttggttttgactgatacattgaaactcagattactgagcaaaggaactttcccatctgaaattactttttctggagtgaccaactaagacagcaagtaaaaatgatatcacctaaacagttccagtacaaaaataatattttacagtactttttaaaagccagatacatgaatcagtgtgttttctagattaataagaactaagttagatagatagcatggaattcagtttaatgttagatatcagtatgtttcctgtcagctctaaagcaccatagttgctatgaaaataaaatagcattacattcttttttctctttcactatcaaaaattatctgtggaaaaagtggctaacccaaatgtacagtttgtttgaacagaaggagatcccttaaaggtatattatttgaaaacttctattttgaaatatgctagtcaatgataggaatattggagggaattgagtttactaagagtaggaggaaaaaggaagcaaaagaattaggacatttgtttactcttggtttttgcatttgctaatgaaacagatttagtttatgtcaatttctatgaaattacataaaatacacacaaataggggaaatggtaaaacatatttagaaggtgggaacaggctagtcaggactatttatagacgtggtctttatggttgtgtttagcatcatggtttttgattttggtaagaggagcaatgtaaaatgagcaggcctgtgcaacatggcaatggacttggaattgagcagtgttctgattcctttctaggatgggctccttctttgcccctagccttccaggcatcaacatcctccggctccacacatccatgtatttccagtgctgggctgtgatgtgctgcaatgttcctgaggccagagtctttaaagcttccagatccaacaacttctaccttggcatgctgctgctcatcctcttcttgtccaccatgcctgtcctgtacatgatcgtctccctcccgccatcttttgattgtgggcccttcaggtctcatatttcagatttgcctggaacacagtattcattttgggatgaaatgggaatggccactcactgtccagactttttaaaaacatgacatttgtcattggtagaaatgagattctttggtagtcatgccatcatgtgatataggccatctcagacaattcccatctattgtctcacttgatagtcataaaaggaaaatattctgtcagggtacgatctaaatgccaagtcctgttgttttcatatttgggagagccaggggcaacacttgacacttctagtctagacgtgttttcctgatgctataacattacatacacaaataaatcagctatggttagatttcatatggaccttgaaaaaatagatttcccacccatcagataataagtggaatcattaaataatgatacacattgaaagagagttgtgattcaaaaggactccatgaattgaaaattggtatgctccttagttccacatctgttctctacccatgtgtcactcaaatcaggaatcaaggttcaggaaagcactttcctcgctaaagctagcttttctatagttatacccaggaagaagtgtctttgcgatcttgaggacaggatttcattcccttaaagctactcatgagcctatcacgagtcccccagttattgctacatgttgttactggccagcatgcatttgatatgaagaggatgtgaaggcatgaagccatgtaaatgccagatccaatcatctaatggtcaaatagaattgtccctttgtgctgtcacacccaagagatttctcaagtcagaaggtttggtgcccaagactaactataaaagggggcatgttttcacactaacagaattatctcagttatttttctgagaatacttgagaactagctggtgtctattaaactttggaaactgacattaataatccttccacatctctctgtctttctctaagtgtttgcttgtctacttttgtgtgcatgtgcaagatacatatgctcacatatctgttggcaagtgggctgaaataaataatgcagacagtgacatctggagacgaaataggaaattacagtcttgaagctgataacttaatctgaaagcaaaactcaaataacaagcccttgaaaagtcttccattggctgaaactcacccatgtgatttttgtatctcagataccttttaaaggtgttttaatcttttactaggaatatgatcttcatctccccagcaaaacactggaaagaacctttgctctttcatgcaaagtgagggaaacataaatgccaagctggttgtgacacagctggattcagacttgaattaccaggcagaaacatgctacaattgtacaattttagctaattaagttgcattccctctggctttctggcttcttgggctcctcagcaataccaacttacactgattttggcaagaatgccatagtaaatttctgatttgcacatttaggtgcagtgaccatgaataactaccctcttttagagaaaaaccaaaactataatccatagtctgataactaattgaggccacaccatgtctgttaaaagacagtatttgcccaatctgaagttggaaaaaaatccaaaaaactccatctgatcttgggattatggagcatatccattttgtttaaatattaaatgattaaaaaccaaaagtaaacatatataatactatactaacttttaaactgaaaatatgtccatttcacttttgtgtgaattacaacatctgtaatacatgttcaagggagtaacttggtaccatgaataattcactgattccagatacttcacacaaaattgaaacatactgctctcagtgttctggttcagagaaactgattttcctctaacctaaacccttagctggtttttactgggagctgtctagcatcagagacctgagggtgcaaggctccttctccaggagtgcagctgcccacttagacctctgataagtgaagtctgatgggaaatgagtagaagctgtggtgtggaatgagatgatgggttatttgtagattttatttcaccagtctattatatcttgtgttcagttccaaagccaattaaaaactgagtgtactgcatactgagttcagagagagcttcctcccagagcagctggcttgggagcgatttattggccacacataaaataccattcaatcaaaattttagaaatacaatattaaaaaatcttctgaagctgtaatttccctaagtgtgtgtattgggatgagtctgctctgctcatgttgtattcttctgttaacaaggtgtgatcagagtagatgggtcgtttactatcagatcttaaccctcaagagaacctatgtagtgttggagaaatattctcttatctcactgtaaccatgtgttttatctttgttttaaattcaaccccccactacctccaccagtggtaaaaacaggatgtttgaagtcattggtgagaccctggaacacgatttcccaagctggatggccaagatcctgaggcagctttccaaccccggcctggtcattgctgtcgttctggtgatggcgtatgtgtttgttctcgggctccctttgagtcccttctcctccccaaagggttgtgttgtaacccaaccaaatgcattgctgactacatgatggtgggcacaaaatgacgaaagccatcttctgctcctgctggatgcgattcacagccatctgcatctgtctccctaggattataagatttgttcccaagtaacgaaaataattatcagtaaacagctaaagcaagggaaacatcaatgctaaatgctaaatctaatcagcatgttgagtttcccctcaaagcatgacccccacctcttgttccataaagcagatggctgtgaatacagaaatgatgagcctctgtgttaatattccccttggggatccgctaggctatattttagggctaaaggcctaaggagaattaaaaaccaatccattctttttttttttcctcagagggctgttaataactatgcatccatagtaacagagtcagaggagcagagcatctcccagttaacctagactatccctgccaagtcagagtgatttacaaaaggacattgaacagaaggattttgtttgtattttccttttactggctttggactttgggctccggcattacaaaatatttgtgttctggaagaactaagagaaatactctcctcttcacctgctagcccctcctattgagaaagtctggaatcactgctgctttaggttaagggcatcaagcatgaatccacttccaagaatgctgttacccacaaggctgatgtggaggactgaacaaaaattagagctgaaactccaattaccttgaaataaacaagctggatgctgacctagttactgtaactattccttgtggccttttcatgctcatagtcacagaaaggggtgagaaaaaggcctgttttcacttttataaattaacaaacatgctcggtcccaagtgaggtgcatactgacaggtaaagtgggacacagacagaacctttccagtaaattcaatgtccatacctttatatggccacaccttccagataggagagatgctaactcagagctaactcaacagtaagcaagatgactgttataaatcatagaaccttattaagaatcagagtgggtctctagattaagcatgttagaaacatcattcactacgtggcccatgattttctttctccataatttcttgagagtgtggtttctgagaacaggttaataaggatcctgaagcctttggtttccaagtttcttttattgtacagatgagatctggtctgacacagagacagacagacagacagaccgaccaaccacaaagggcagcttttgctactatgttcataatttattgtgagacttgttttaaaacaaagggacaacactattggaatgcctatctctaaagatgcaggaaacttttcaggaatttatgcttctgttgccttaggtaccccacagtgactaacttttaccaaaaataatcataaggaagagctgcattaatcacattgtcattagcacaaggatgatctgctcctggatgatctgaggtggttcattagtgtgacaaagagtcactactccctcttgctttggttccttcagctcattttcgtcaacaacgtttggaatcagtggaactatcagacgacctaaaagtcacttgcagggaatggttcatggtgtccaaaaactgttgacactacaacacaacagtgtagactacacaggtgttgagccttatctgtagctatcctaggacacttacggctcaatgctcaaaacttggcatatcaggcaggctaagggcatattcttaaagatccagaagtagatggtggaggacaagagaaaaaaattgatcatgacaaatacttaaacatctagagatgtagctgggtggtgctggcgcacacctttaatcccagcacttgagaggcagaggcaggtggatctcagtgaattcaatctggtctacaaagcaagttccaggacacccaagactgttacacagagaaaccctgtctcaaaaaaccaataaaataaaatctaaagaacattcttggttcaagaactaaggaaagcactctagggtgctggctcttatgcgtgagccgtagtttcatagtacttgatacagtgggaaagtggcagcatgagggtgaaaaaggtgtcctcaagggggctgaattttgttctaagttgtggacttaaatccacattgcagtttaccactcaattgctttttccaaagccatgctcccacattcttcttcaagaggccccaacaattggcgtggatttttattaccattaattagagaatgttacaattctccagtagattatattaaatccacttggatggttttcagtattcacacagaatttaggttttctgtaagtgccatcagtgaatgtgaggcaaggaagtgtatgcaaggcacactcatttaagatgcatagggaatcacagaactgaaaatgatttgtgaaagagagattttcattcatctatgtccagaaacatttccaataaaattcttattgcacacacacacacacacacacacacacacacacacacagagagagagagagagagagagagagagagagagagagagagagagagagagaggacaggaggacaggagaggaaagggatagaatttcatgccagatgctgccccagatgttttcatatatataatttcaggcaaactctagctaaccacatgagagataaacccaactaaaccgtgtcaatagttatgctgccagcaccagatggctcataaagggtcgtctctggcatgtgggtgggcagaggaaatgtgtttaatctccagttatttgtagtgaggccagcacaagctatctttcctttttactacagtccccctttgctggttcattttgcccaaagagaaaatgaggatatttattttgtcagaattgttgagctggaatttgctttttctagaaatgtaaatgacatttaaaatctgaaattattccttggtgaaatagtttccttttgagggagggagaaatgcaaatattatattcaatggtcggggagggggggtgatccatgttaatgaagttatgcccttgaggattgtagtcttggtcataaaggctaaaaggccaaatatggagttcaaggtataaatgtagggagatatcccaggcacctcttatatatttgacacaacttagttttgtttcaaaactaaagtttttctttagattaaaagggaaattgtagggagatatccctggtacctgtagtattgacctgcccttttggggtgtggtcacaggtatatagtaggtgggtggaataaaaggctggggacagggacacatgctctctccggttgggtctcagaaggctgcggaggctaacctgggttaccagcttctcttgtgagtaatttcccataataaataagcaactggaccccttatccagtgtgcggtcaatttcattttcatataaacatttaacatattgccaaacctcagcagatctgctgtattcattgatgctattgtcattgttcagaagggcactgtaattagaatttaagctgatggtaatacacttctaagaagctaatactgggccccatggaatgatggatggcatactaggtggcacattcaaaacctttgggccaactttctggctttgtcctaattgttgtctaatgttaactatactttatttcagtgatattggggattaaacctatagctttcctcatgataaacaatttacctgctactatatccccaaggtctaactaagcttccttaccaatcctggctttgagcttgcaatgtagcctagccagtgcacatgaaatcctcttgcttcagtctctctcctaagtaaatggcaatctccaggcatagatgctaagtacacatctttacttctctggactccagttcttacacacagaattcaccttttgattagaaaagaccttgtatccatttgtatgctagcattggttaatatagtatcattgaggataatgggaaactgagaaatgccatcaattttattttattctgttttattattttaatttagattgaccatctattatctcaatgctactgccaagggccagaaagcagcaaatctggatctaaaaaagaagatgaaaatggtacaatataattggtgtgtgtgtgtgtgtgtgtgtgtgtgtgtgtgtgtgtgttataacatctttaccaaagtcaagtagaagaaatgtgaatgtagtcttctctctttttttttttttttattgtgtagcaagctttggagaacaaactgcgaaacaagaaaatggcagctgctcgagcaggttggtgatatgtgtttgtttagatgctttgtgttcctaagagtacactcttcctgtctccacatgagacatttgatggcctgctcatcatggtactcagcagcttatctcatgcttcacaccatccaatgtctaagatcttctcaagcttctaccccaggacttggtttctgtttcatgggagaaggactagaaaaaataggatggaaaaattcaacagtgtcaacttaggaccacagatgaaaaaaccatcttaaaacctgacagaaaatgataaatatttccgtctggtcatgtgcaaatagcaaataccacaggacttactttgactagttttataagtgggacagttgggagggtacccaaggaatcctcttctgaactcactgtcttgtcttcaccatcagaagtttttctaacctgtcacctttcacttttattattttctcggcactgaggatcaatccagtgctgtactacaaaaccgtgtccctaggcctctttttattggtttattttgaactgagttgccactgtgtttccaaggctggcattgtagtcactctattccctgactttgcaatcttctggcttctatcacacaactaggattgcagttgtatgttagcaggctggctacactgcttttaaaacctcttcaatgtttaaaatacaattggccttccacttgctgagtatctgcatctaccgatgtaaccagctatgggttgaaaatattcagaaaaaagataaactgcaaatgtactgggaataaagccttttttattgaccgtcactgttcagcagtattacaaggaggacttgtgtatctatggtggtgacagtggacctaatcccctgcagattaggaagtgcatcattgtttaaataaaggatactttcattggcaaaaaaattaatgatgggtcttgatccatcacccccacccccaccactaccacagtgacagcaaaaagatactgaataatttgaatgaatatcttttccaacttttctaactttctaacttcattcctaacttttaaaattctttctagtagtaaaacgttaacctcctacaagtagtgttgaaaatatttaactagaattggtctaattttaaaaagagacatttactaagccgcatgaacaaggccctgtgaagcttccaagtacttgcttttggtttggctgaactggaggttaaaactccaaggccttgtgttgagcaagatctatcactgccctttgaaacttcctgcttcattccttacaaactggtgcttctgtttttttgtttgtttttgtcttttttgagttatgagacaaggtctaagtttatcaggctggccttaaactcaggatgtaccccaggtggccttgaaattgctactctaaaagagctgggatcacatgtctgaatcatcagtcagccccagtttgcactttaaatcctgcacttagaacatgctcagcccaagcccacttccatgtgaatcactcaagagaaggctgccttggctgcagctaacttgtaccatggtagtattggatccacacccaagtccttgcccacagactaactcccaacagaacagagctttgaatttgaatagcttcctgaaaatgactatgggatttctttccttggaattctgtgggatcttctctttttaggcaaagcctacttgggtagaacccccctccaccccccaccaatcatcccagccagaagctggatctgggcaagagtatagtgggcggctgcagccaatgaggacttgtctcaagagataaggttgttcgccttcctgatttgcacaaagtgcaccgagaagggaccacgacagtttaagaaaagggaggaaatgctggatggtcccaaagagcatgactcaagacatgactttcttgtctccgttaagctttaagtattaatttttttctcccagcatggagaaatgtagcatcaatcaggagaagctgacatgggtgatgccagtgatacacagtttgccaactagtcatttcctaaccaatgctacataggagcactgcccagatgcacacggttatgaactcttttacaacacaccttttcccttattccagacagttgggccttgctctcaacttcccaacccaagtacaccaatgcaaactttttcagctctcttatttggttcttgatgtaatcatctccaaattgcatgtttttgtcgtttctttacctcttctttttattattaaataattattgattctaatgcaaaggatttgattcttctgcatctactctctaagtacttttcccatagcacttgtttgggttgggatgtggtcattacacatactaattttctcaaaattaacatttttctatatttcactaattcagtattcaaatatctgctactcatccaatcacactcttccacatcctatctctgttgtttgtatacttatcagaaggcaccaccactctagaaactcaggccctttaactacatgaaattttctcaaattacttgttagtgatttttttttctatccattttctgcttgtggaattcctagtatttggcatcttgggccagttctccatctttttgctttttttttttttcttagttttaaatttcaaaatttcttttggtcttttcacttcagataccatggattgagttttgccaaaccaccttagtatataaatagcatccccttcttgttgaagacaaaggtgtcttgtccttgtgaaaatactaattcctctttgaagtttctctgctttatgctctactttccgtaagcggctttgtcttcctctgacacaggccaccgttaccaccttccctctgcttgtctgtggcttctgacatccaaagtacaaaacaagtttgtatgctctgagtatatgtatggggcatgcacaaagacctccatgaacgcccatgccagtatctttacttcccaggcacattacatgtcccagaaaagtcaccaccaaacttcagcctaccctataaatcattcatgtgagcttcttgtcatcactgtggtactccttgtagttttctaggtattgaacacctttgttttaccttttccaggaaaagaaagtccatcagtcttctgccaggataagaaagtaaacattgatgctaagaagggaaattgaactgaggccatgattgtctttttgtttcatttgctttctgagatagggactcattgcacagctcagactggtctcaaacttcctaggtatctcaagactagccttgagtcttcagtttctgaagtcctgggattctgtcatgtaccaccattcccctcctcatccatcttctaactgcttcttagctgaaacctctccatatcttggctcttcatttctagaacaacttttgtatctttggagatttttcagtgtaaattctgttgctcctcatcttttttttttctctagtggtttaggatttctgtttgttcagactgatgagtcccttgtttagttactagttttcctcgtccccaaatcactgctcttctccatgacaggcattcacactccctcccaaagtgtgcttgttcaatccagtgcactcaccttcacagtctgggcaaatattactctacaccgagaggtcagtgagtctgtttttctctgtgatgattctgcttaattcacacaggtagatacttggggattggaatgaaattaatgcagatctcaatggagtcagaacgagtttgaaaacagatggtttattgggaagtactcatgcaacagagccagtcctgtacagccaggcgggagagggaaaagagagctgcatgcgttcatccctcatatttaaagccttgctacttcactctgaccatgcccaagtgtgtgtggtcagtgtcacctgtgccagcccccaagtgggcatggacagcatttcctccctacaactgagcctaaaataaaattggagcattgcctagttttatcaagagatgaagggttagatgcatcccgatagtgcgtctgtggaatttaatgctatgagattaatttttcaaatttcgagtcgaatgtcttgatttctagttaagatttactattatctttattgcttgaaataatgatataatgtataacatgataattaactgcttcccttaatgttatagttactgagaaatgtgtactgagtatctaatgacaaaaagaaattcgtatttgagaaaatgaaaagaaatggatttctatatttattgcataaacagcaattatgtactaaataagtatcactttcattctttctctagaatttgtgagaactttgtaaaatgacatagagatagtttgactataaaattccaaatattgttgtaaagtggaacaaattgtgaagataatagatttgaaactacctcatttagaatcattatgtgcacggagagctggaatttttcattcgcctttttttcatctctcactcttgttttaaacagctgcagctgctggcggccagtaactttatcaaatattctgggaggcccagaagtgctcttcacttctgtttttgaatacagagagcttcgacgggatgggccagtgaactagcattggcgaactgccgcactgtgttctaccactgattggtcttcacagccaaggtcacgaccatttatcaagggatcatcagctctccttgagcaagaagaatctcaccatattctgtatttggctgggttatgatgctttctctcttgcttcccccacatggtctcaaacaaatcgattttaaatgggggtgtgatctagtgataaaaaatactcggtataattgataggaaactttaaaaagtcaacatttcctcatacagactttcttcttacagacagatttagtttcttaaattgggagtggggctataatagcactgttttaccctttaaatttagaactatttgcatgagatactcagtgtgatcattcattgactgttttgtatgtactccttttcttattaattcatggattgatagaattgacttctttctcacatatatgaatgtcatattgatacaatattaattttaagagaattggctcactttaaaaatatagcatctctcccctacttttttgtctttctatccatcagccctcacatatgcttgtatttacagctggattcagtataaaaagaaagaatcttttcaggagaaatgtcacatgtaagttgatattccctgaagttatgacttaacaatagtttgtcaccataaggagtcatgtggttcttagacaaactggacttttatgagttcaacaatagaagacagcacaagtgacaggtgtccagtcagagtaccctcttttaacctccagtggtcatcccttgatggttgtagtctgtggtggttcttggctttttttgttgttgttgttgagtttaggaaagcatgcctttagttggaactttagtttatagctttgtttaaacattatgattatctaaaggttgagttcactgaatgatagcactcagtgccttccacatcttgtgctgtaacctcagtagtgtcttgtaacacacagcatccctttccagagctgacgcaaccttcatccttgcaggtgactttcagacttttgttgccctttgactttactccttctctttaatcttttttctgaatgtggaatggtcatactgttttcttgccaattcttgacttacttcctccagtttcctcgtctagatagcttctattcccaatcatgccactctcctaatgagattccttagaatgttatatcctcagggtagcttatgtactgatgttatttttcactttgtttattgattgtttcttgcatgcatgactaatctttcctatctagactgtagctctttaggagcagggatcatatcttctcactgttctatatgtctcgtacagtgctgtgcacagttgggcactgcataaatgcttgctaattaaattgaatcaatttgacttattgcagttgctttatgaaggaaaagacttgtgttagttgcatggaaaatgtttctaggatgtaagaaatggactaactcctgccagacttcgttatcattagactgtaatgcaaatgagtaaataaagatagcactgatttctacaagggttgtttgtgtacagtgtggtaatacagagaaatagtttattatgtcaccaaattcagaagtgaatgtcacccttgctctagagctatttcttaagggtgaagagaagatagcattttgtttgtttgtttgttttttcgagacaagttttctctctggctttggaagctgccctggaactagctcctgtagaccaggctggtctcgaactcacagagatccacctgcctctgccttctgagtgctgggattaaagcgtgcacgaccaatgccgggcaagatagcatatttttaactcagcatacttttagaaactattgtaatcttataaacattcagacttcatttgctaagtttcagtcttttcacatattaaaaatcaaccttaggtatttagagcacttacacaacactcctgttttaagttaagcatcttttacaaattgtaatctttcagtcttcagagtgactgaaagcgtgtctgaatgactgcctgatgaggatgtccttctgtatatatgtttcccttattggttgatgaatagatagagctagccaataagaagccctagtcattggccaacactttaataattaatgtaacatctctgtgtgcttacttggggctgagaaggacggtggggcctggtgggacaagaaaacctgcaacaactgtctccatggacaagtgtctgcggcagtgagtactggcttcaaagctgttctgaacaccgtttcacttggctacttagctagagttcacttctgttttcttcctacatctaagacaaggaagcacaaacatctagactgtaaattttcttctttcagagaggaataaaaaaaatctctgataaatatatgcaaaataaccttgtttatctggagagatttgctgtgtttgaaaaaataaactgcacttcaacatgctccttgaatgatttccttcactcacaggggcatataatttaagctatatccatagatttatattaaaaatgttcagctgaacctgttttcttattctaatagatccccacaagacctagagacagatacatataccaaaagagtaattcaacaggatttaaatatgagaggcttaagaatgggtttggctggggttctttttatttatttatttatttatttatttttccaactttttaatttgaattagaaacaggattattttacatgacaatcccagttcccttctcccacccatcctcccctacccttctcccaactaaaaccttatctgtcacatgtcttttctgctcccctggatggtgaggccttccatagggtgtcatcagcgtctttcgtatcctttgggatagggcctaggcccacccccatgtgtcttgcctcagggagtattcctctatatggaatgggctcccaaagtccactagggataaattctgggcttctacaggaggtcccatagctttctgaggtttcctcacagaaacccatgatcctggggtctggatcagttccatgttcctggggtctggatcagtcctatgctggtattccagttatcagactggggagcaagagttcccggatgttcaggtcagctgtttctgtgtgtttcaccagcctggtctggacctctgtgctcttcactggtccttctctgcatctaggttccagttcagatcggtgattagttatgggtgtctgcttctacttccaccagctgctggatgaaggtatataagtcagtcatcaatctcataatcagtggagggcatttaaggtttggctggggttcttagtgttcggtgcatgtttgcacttaaggttttggaagactttgagacttaaccataacttaaaaactaatagtttagttcacaaagcatatctagtttcattttgcttctcttaacatatccaatgccataggacacattccagaatattttaatgactataaactactcaaaaataatgtagcctaattagttccactattgcagaggtgtaggtttagatttgaatattatatgcaaattttaagttacatccttttagaacagttttgtgcagaagcactgagtatagacttttatgtcagcatattcatatttcaagacagttttttattgctatacttacattacttcttaatacttaaaatatgtttgctattttatagcatttattttgcagtcactgaatttctctcatgatgctgttttatttgtggctacgtgagtacttctttcagaaactatctaaggttctaagaatcttaagtggcatcagcatggctatacaccaactcttaaacactgtttgaaatcaagtactacctatttttgctaaccaagccaaagtgtcatctgtataggcatacttttcatattttatttgatatgtaaagcatttggtcacaattgcatttctgctttgagtataacaatatatttattgttaaacataacttgtccaaaattatttccccaaataagacagatagactacctaaattttcttatactgatatttttttattgtcactattcacaaaggccacatttctctggtgaatattatcattcaaaagaaaaccttaggagtcatgactgtgacctttcaacatcttctccatgttggcaggtatcaggcaaattccttccagaacagtctgttggcatcatgtacaagcaaaaagaaatgatttaaattcaaatgaagtcatgaagtaatttatagcataacaaattactatctggtcatctaaattgactcacagtgtatccaatgttttcagttgaatttaaagctcttcaggatctggaggtcctgatgggccaccaggaaattttgccaaaaaagaaaacaggggaaaatgctataaaaaatcagattgggatttccatgttctaggtaaaactctgaagttgtaattatacatagagcctttgagaatatttgaccagatttatcacttagttcctcatggccaaccgtttttaaaatattgaatttattttgtatgcatgtatgtgtgtgcttgtgtgcatgtgtatgtgtgtttgtgtgtgcaggtatgtgcactcaaacataagtatcttcaccttactttttgagagaggatatctcagtaaacctggagctcaaaaattttctgatcagtcagtttctgggattctgctgtctctgcctttccagtggtgggattattgtcatgtgcctctacacccacccttgcatatgcttgtagattatttgaattcaggtcaagattcaaactgatgtcttctggttttgcaacaagcactttacccattgagttgtctcctatacccatgtctaattttgacagtataacatgacatgacatttgtcatctacaaaattcatggtcaactatagaagttaccaaaaaatgcaaaaactattttaattgagtttattatgttttcttggtcacattcatagctttcctgtgctgtagtagcccatgggccgaagctgggcatatctggagaacctcattatcatagtccattttctgagaatttttctctacaaacaaaactattctgcacagacataatatttaagggaggaaggaggatgagtggacaagaaaattagaaattattaattacctcagataggagaaaaaaccaccaaattttcataagagtatctgtaattattttagaaaattaatcttcaaaaatgaagttctaagtgcatgatttctattaggattgggaggaaggtgctgcttccacatagacagtgatgtgtggcatcatggtagcatattgcccttacagttttctagaaggtccacaaatctgggaagctctgaatttaggtcttctggacctgcaaatttacctaccaagtttcattggcatagacttgctcttccatatctgactgcttcctatcggcttggggtaagggatgttgtagccagagtccagaagatggcagctactcaatttcttccttattgtttctttcttcatcagttataccctgtttcttttgttttcattgcatccttacatttattttgtttgcatttttgtatgtgtgtgggcatgtgcatctcatagctttcaaatgagggtcagaggacaactattagaagtcgttgcttttcttccaccatgtgtgtcccagggatggaactcaggttgttaaatttaggaacggataccttaatcaactgaaccatctctctggcccaatttttaaattatatattaatctatcagatatcaccaatatgggaatacttattttaaatactaaagcaatcaatggcaacacatattgcttaattttaaggaaattatttaatgtctttcttagttaggctttcactgatgtgattaaacaccaggaccaaaaccgatctagggaagaaagggcttatttcacttacacttatggaacacagttcagtcagggcaggaaacttgcagacaagagctcatgcagagactatgggggtagggtgcttactggtttgatcttcatgccttgctcagcctgctttcttatagcacccaaaccaccagtccaaggtggcaccatgcacagtgatcatgggcttccctcatcaattatcacagttaacagggtagagtccaggagtgctaaaatcctacgtgttatattcttttcttctggggatcagagttccttttccacttgggtattgcttaaaaatcgataatagttgataatagcagccgatcatggaaatggattagtgcaagttttcagaaatcacttatttgctaaagcagaccaaactgcatagagtaagacagatttttctgtcatctcattatgtcaaatgtggtgaggataattgaaaaaaacagagctgaaaaataaggtacttgaatcactgacctcagacttacaaagtttattggaaatggaattcaatctgtataaatggctaccaaataggatagacccattggcagatgaaaatgagcctgctacaaaagtggaaacttgaacctcacaaccaatctcagaacaagatgaatttatgagagatgttcatctcggtgaacaatagatcaaacccactggaaatatccctccactgaactgtgtcacagtggaactgccatgtgtttcatctctgtagacttaggtgacttggtggttggaagcataaatctgaagtcgctgctaagatttgctttgcaactttgttcctgactattgtcactcatcagccactgatttttgtattattattagtcttttgacctgggatcatttcctttattaagtaagcttcaatcatatcatctttaagacaaataaaaaaaaatcatgtccactgtggtttcttgtggaaatccatgaaatgatttctcaaatctttgagtactaagtaacccatagttaagtcacaatgaggtgacatcacccacaaactccctttttgtgaattatatttcttttaactttagagatttagtgaataatcagttaaagtttaggtctagggaaatggctctatgtataagattgtctgttgtgcagtcatgaggttctgagtttgaatccccagtacctaggtaaaaagcccagcatggctgtcggcgtgtaccaggagatggagacagatggatcccaagagcttgttggcctgccattctagattaaacagcaagattccagtttgcattggtctgttctcgagaggaacagagccaaaggggtgaaacaatagatgtattggagtatatgaaaatttagaattgttttagagaatttagagaagtttaactgagaaataattgcaaggaagagtttgctgaattaaaaagtctaactttttagaggtttaataaaaacaattgatgaatttgtagttatttttagataggatctttagtaggagcctaggctaagatctgttctggcatagttgtctacatttggaagtcgtgtatcatctctgggtctgaattttccatatgacaatgaggttatgcaacatgatttctttcacctgcatttagcccaatcagccagtatggtctcccttaactacctgtgacctttgagtacttacaacaaggctggaaatttaagtgttcagtgaaaacaaaacacacactgtatactatattttgaagaccaggacacatctaatttaatgcatatatttaataagcttttaagctctaggtttcattatgaagagacacttttggatacatttggttaattcaaacacaccagtgaaactaatttcatcattcttctttctttgataatgtgactgctaagcagtttactgagatctatcacttgcatttgtggcttgtgttcctgcaattttctatttctattttgttacattccaaagggctctgaacttatagcagaagttttggtgagagctctatttgttctaaaaactagaatttaggtctttggaaatcttctggcactctgacatctctggttgcttccccagcagcaaggacatgtgggaaatcaggaaaagatcggattttaaatgtctcccaagggccatgttgctatttttcagagaggttgggcttatggaggagtacttaggtgagtagaagtgatctctcggagtgcattgtgggactctggcctcctcccctctacttctttttcttctcagacatgagctctaagtggtttgattcccttggatattttgttagagtgatggattgctgctgagttcatgtggtagtgggctaggttagagtcctcaggaggtagagattgcaggtaaaaatgatggagctgttcgtggaggtggtcctgaggcagtagaacacacatgatgcagctgtggtgtatgggaaacaaagcctggcacagcctcctgggaaaagagcatcaatcctcagtgacaaccatctactggctgtttggaagcacaggtagttgcacacttgaaatgatcttgactttctcatgacaccaaccagtttcaggtagttcccaggtactggaactaacgacagaaggaggagcaaagcaggggtacaggaaaagccacatagggaacctgacactcgaatccgaaactgtggactccagacatgagatgaaagtttgcatactgccagtgtctattacccttagcatttgttctgaaccccaacaagggctggcaagatccaggaaagtggattttaatttttaatttgattaaaataacaatgattttgaagaattgccatgtctagagaggccatggcccaggaggtttcttgaactgtaactgaggaagatagtatctcttgatactatcttagttgtctggctgatgatgtggagtgtgggggaagtgctacagacatgcatgggctacttttgcattgccttctctgtttcagtgtggtcaatgatattataagcatgccagggtccttctctgggatgtacaaatcttattcttgaggcaatgtcagggttcagttctgacatgtactgtttcttagacctatactcctgaaacaaaacaaaatgctttttgtcacgcacatattttttcctaaacatgcttgtcccatgcttcatgagtgtagcttaaactgatgtgtgcactgatctgtgaagtacgaagaggcctggccccagaactaagcacactaacacttctcccagttttcaaaatgatgtgacttttatgcagattttagagttttgagttgggtcagaaacaagaaaagcacatttcaaatatccataaaattaatgaacagtattaagtgttcttggcaaaatccagtaacactttttaggggagaatcttggagtcacattcagggccaggctgacatgttttccagtttctcaactactattccgaagctcaacagagataattatcatttccctcttttccacattttttatttatttattagtatttctttagtgtgtgtgtctgtgtttgcatgcatgcatgtgtgtgtgtgtgtgtgtgtgtgtgtgtgtgtgtgtgtatgtgtgtgctgtacacatgttcaagtatacacactgtggttgatgacagtcttcagaggagtccattgtctctttccatcaagtgtgtgctgggccgtctttcctcaccaatggcagagacagatatatgtgactcactgtttctaatctcactggaggagagatatccacatatcctcatctggtctctaggaaaggtgaataacactaccatttgggtcagaaaagatcatggccaatgaatgccagacactggattagtgtttggaacccagcatcaaatagcagatgtttttctagagagaggatacaaacaataagccattacagagagaaacataataaacaaatgcctgcacaatttaaaaaatcctcaactaggagtcactaaagtaggatacaataagtttagtatgatggagctgcttcagggcagtacttgagaggtcatggagaggtgcatttgaggggggtacattcaacgtaagacatagctgctgtgaaatgaatgcttctagttcatggctttgagtgattttgattgcttaagaccccacggagagtaaaaagtactccctgaaagggatttaattactaaagactacttttacttgctttagagaagtaaacactgctttataaatgttgtagaaacaactgcagttaaggaaaatgtgagtggccagaaagcaacccttgcactatcttgttggaatgtaaattgctgtcaccactgcggaaatcactatggagattattgcatgaattttccctggagagatatgaacaaatgcccagtcacccaagatagggcatctacaacaactaaattccacccaggtctaggttagtgacctagtgagtttattggagttgtgtataagagcacaggtgacgatttacttatgacagcatggatgactcaaaggcagctgcatcgcagagctctttggaccacttgcaggcagctcacaagaaagtctctttaccccaacagttgtttgctgctttgacaatcttaggcacgtacatacttgagcatcttgagacattctcagctccttgaaatctcatgggacttgatcttccctctggaagaggaatattttgagtcagaggaaatggctacccaacagaaatttctcaaaaaactaaatagaactaccatgtgatccagctatactgttcctagatgtatacctaaatcagcgtacaacaaagggacttggtcatctgtgtttattgtgacactacacacacacacacacacacacacacacacacacacacacacacacgtacacacacatatatatatacacatatgtacacacacacacacacacacacacacacacacacacacacacacacactggagtttcatcagttcctaaagaatgaagtcatgttgttacagtaaaatatatggaaccaaagatgatcatgatcatattactgaagtaagccaggtgaagaaaaacaagtattgctctggttattatggaataggaagagggtgaggacgatgggagaagagcaatagagggtaacaaagggatgaatatgatccaagtacattgtgttcacgtgtgaaaatgtcacttgaaccccactattttgtgtttttgtacaaatggattgcagactatattgtgtagtactctgcttctaacactgtctaatctaaacaaagcatagcaggatggagtagtaaggggaccagactgaaaagtgacaaagcagaaaggggggtgttctttttattatttatttttaatatttttgtatttcttgaccttttgaaaaaaatatttgatcgtattctttccccatccaacttcattttgtttctcataaaacaaaacaaaaaaataatcaaacaaaacccaaaagacaatatcaaagcaaaacaagaagtgtggagcccattttgtatttaccaactactcctgagtgtggggcctaccctggtgtgcagttcatatatccaatgtaggagaaaattgattcccagcggctatcaatttcaaatagcttcttggtagggtagggctttgtgcctacttctgattctcagtgctgggactttagctgccttgaacttgtatatgtatggcttgaacttgtctgatgtgtgctatcacagtctgagtcctcatatgtctcggtcctgttacatctgaaagatactgcttccttggggtcatccatcacttccacctctgtcctccttgaggagaaggctttgatgaagacatcctatttagggttgagagctccaaagtctctcactctctgcaccttgttcagttgtgggtctttgtgttaattaccacctactacaagacaaagcttctctgatgagctttgagtgatgtcgtgacctatgagaatagcaatataccattagtcatagctgtgtgggggtctacctcctcctcagggatcactggtcatcagtcttcaagtgaggagggagaaaaagtggagaacagggttcagatggctgtgagcaagaatagaaatagccttccgggagactggcttcagtgttacagctcaactgtatcccagagcaaggtgacacatacgggatgggaacagcagctggagtaccacctagtttgcatttggcagcgtcgtcctatcatagagctgcagcataatacctacttatatgtgcagcaggaggagagcatctgcagggacctctgtcaaaggtcacacttgagataggtcaggaatccagcctttgggacagattctgataaaatcaggcctcttggcctaaagacactatccagctagagagggagtcctgctggaaagggagccctccattcgtaccaagctcagggagctgtctggacatggtggacttcagccttgagtgtacagggtactccaaccactatgttcattcagcaaaatgagagttcttctccctgtgtcaagtttttggccactttagcagtgccaaatatgggtttttatctcatggagtgggccttaaattcaattgaaaaggtcattctcccataatattggcatcacaatttcacctgtgtatcttgcagactggtctctgcaggttccagggttcatagctgtgtgagagtgatgatcattgttgtttggtagtacctcccagcactatgaagactagtcagtagggtgaaggttctagttggccaccagctcagtttctccatgtttgatgacataaggaaatggtccctactgtcagtttgtggagggtaaccaatagcattactgagagcctatgatgtttggggtcatctagggggctctttggccaacaactcaacaacttgtaatttgctatcactggaggctttgcttggtgctctagttttggcatggtcttccccattatatgttgattgttgactccatttaaattccatatctatatatctatatatctatatatctatatctatatctatatctatatctatatctatatctatatctatatctatctctctctctctctctctctctctatatatatatatatatataatatatatatatatatatatcttggggtgcttctacagtagtaggtttccataggtttttcaaatggcctttagttagttgtctgtccgcatattctctcttttacctttctttcccactctcctctccattttttcctcctactctactttctcctttatctctttataacagtatactccattttctcttccttggaagatctcctcctccctagtcccttactatctagcttgtgtttgttggattggaatgcacatgtctaaaacttaaaagctaacatccacatgcaatatttgcctctcaggtctgagtttcccacctcagtaggattttttcagtcatttacctacatacttcataatttcatttttcttaacagttccgcatcattccactgtgtaaatgtaccaaatttttattatccattcatcatttgagagacatctaggttgtttccaattgcttgctattatgaatagagcagtgccgggcattggtggcacacacctttaatcccagcactcgggaggcagaggcaggtggatctctgtgagttcaagaccagcctggtctacaagagctagttccaggacagcctccaaagccacagagaaaccttgttttgaaaaaccaaaaaaaaaaaaaaaaaaaaagagaatagagcagcaatgaacaagtatcaacggaggcattctttattctaagtttcatgctttcaattacacaggagccccccatttttgtatttcctcctgtaaatatatcatgaaccaagacaccagtaatagccaatagactcacacaaagcatgaagctttctgctgtgggctataatataatgaagaaagcaggtgagatttttatggacttgcactactcttacactctgattctgcatcacagattgaaacttcaggtcatcctgtaaacaacacagtctaaatccttgtataccatttatagtgtttgaagcaatagtttctggtagctggtatgcactaagaactcccagatctcagtttaaagagaatctggaaacatgtattcttacaacacatattagaatattaaatcttggggactagggagatggctcaatgggcaaagtgctttccacataaacatgagggcctgagtttggatcttcagaactcatgtaaaaactaaccctgaagcatgtgtctgtgagcccagtgttcctatagcaagataaattgtgaagacaggagaatccccaaagttcatgggctgtgcaactgagattgacaagaaagggactgacaagagaccctgcttcaaaaggcataaggcaagaagaaacacacacacacacacacacacacacacacacacacacacacacacacacacaccacacacacacacacacacacacacacgcacacgcacacgcacacgcacacgtgcacacacacacacgcatacatgcgcacacacggaaactacaatatttaaacgttaatgagtacatatgtaagcattcagtctactgagaagatgctgtacaacgcaggctcttatatttctgataatagaagtcctgtcagtaaacagtctgtcttgcacttttttcatatatttgtcaaagctgttggtgtttttttgttgttgtttcattctatcctgcttcacatactttattctcagcgtagaattgaaacttcagcctgggtctcaagtatgttaccacaaggtggcgctcaaacttctcttaaagtcttacatggcactaaaaataacaattccttaaactgtaacctgctatcgcctgcagagattctgtacattttgttgctgttgttcagaattgtctctctgcttggaaaaagtaccagtatcagtccttttttaaactttttgtttttaataaaatttacttaaattaaaaacaatcttattttacataccaatcccagttccctttccttcccatccttccatgtccccatcaacccccatcccacccgcatccactcctcagggagggtgaggcctcccatggggatcatcaaagtctgtcacatcatttgggcctaggccttcccccatgtatctaggctgagagagtatccctccatagggaatgggctcccaaagcccattcgtgcactagggataaatactgattccactgccagaggcccaagtcctctaactgccacccatgttcagggggctagttttggtcctacgctggttccctagctgtcagactggggtccgtgaactcccacttgctcagctcagctgtttctgtgggtttccccagcatggtcttggttttgttttatatattttatgacatgtggtacagggagcagtaggaaaaccagaagaatatgttttaaagctgttaagatcttatgggtttgctattcaaattctaattttaaatagaaaatgaacccaatgcaagcctgaatcagtagttcccatgtctgcactgagataatgaaaagtactctttaggcagagggccttgtgctcgtttctgcctatattcctctgactcatttggactctccataaatctcactttgaattcatctgctttgtactgaaattctgtctaatgtttgtccttggtaggtttgtttaccggttattactgacatctggaaggacctttgttaggtgcccctgaaccataggttcttttatctggtgtgtgttcaaagacaactcttacttcaagcctccttagatgacatgtgtggtcctcccacaagtctttctaaacgatctctatcactttaaaaacctactctcccataatcattgttaagaataatgagtaatgggttgggactgaaggtggcaggtccccagtcccacattggcacctcgaggatcatggttctggggtgggtgatggacagtgggcagatgggaaacagagacctgtagacatgactcatattgaaagattcattgagagaggagtaagaaaataaggtaaagagacacagagacagaaaggacagaaagaagagtgagacaggaaaagtcctgtctacccatggggaacaatggggaaagagagcttaagtgggtgggggtctttcttttaaagaggtcctttgcacctgcatgtagactatgtagccatggaaccctgggcttaccagggtactacttaaatgcattctaccaggtgacagggacaggccagcataatgtctgaatccttacaatcacatcattactagtttattctcatttatcttcataatgtttaaagatgcctacctgataaaatgaaccttgattttcaatgtaggatagttacttctaatcctgattagtatttttaagagtaacataaacatgaattttaaagttttacatgtattaaagatgaataggtaaatggccaatgagaaagtgaggcctggactcttagttggagtttcttatctgtaacacatccctgtgagtcttttcacctctgctgagataattcttacagtatcttcagagacacttgtttcttttaattttgttttctaatattttattggcttgtattcattgtgcatggttctgcgttacataaggatattttcatacaagcatataacattcacaggatataatctcctcataagcccataccccccttccctccctcttctacccttctgttaatcctcattgttcctctagacagtttcaactctgttttcctgtcatatatacacacttgatcttaagcatctatataaaatctaggatctataaataagagatgatgtgatatttaacaatgtaacattattcttctttatagctaaaattttccattgtaaatatcaatcacaatttctttgccccattctctatttatggactcccagattgtctccacattgaaatctagagtaggcaacttgggatgtcctcctcacttctcctgctagaaactgcttcttacctctcctgatgcaaccttctcatacttatcaagggctaggagtttctgcacaagctcagtctgttagctttttgtgctttcagaatgtctcttctatatataccagggaaactacatttatgaaatatcaataatgtgatttcctaaacaagatctgtccaatgacaacactagttgacatgccaacatggatgggggaaatctgtcaggaactcatccttagatgaagatctataggcagtatatatactggtgtgggggcaatcaatcttctcccaagataagaccctgatggattatccaatcacaaagtggtgatgggattaaagcatgcgccggacaatgaaacccatacttggcaccattgttgggccaagaatctgtgactagataggtcacaggcctaagggaagagcctattactattatcctgctaaatggaatggtatgaaaccagcttctcataatttaccatcatacccacaattaatgaatctgtcagccctcagcagagaaacttctacagaaaataagagactaaagatttagatgttcctaaataagacatgtctatcacaatccgtctttccaaggttgagggattgaggaagaaggagacagaaagagtgttagacagaggtagtagacgaataaaggacagtatcttttggacatagcatggcagctccacaaatgaactcatagtggttgtgacaacttattcgtaacctgtgcagcccaagccagaccaaatcacagtgtaaagaggggatgtagacacaatttcccaactactttggaccagctattggctgttaatagcttctttaacattttctttagcaatgtaaccctagtaagacaactgtactccagtggaaggccacacatccaagaatgtatgggcagcataaattggacttaatgagtgtaaaaaaagagaaaagggagagatggaaggagggagggagagagagagggagggaggagataggacacacaaagttggttgggcagtcaagaggaggtagagctgaggagttaggaaaggagtgaatattgataaaatacattgtacaaaatttgaaaatatccgtgccttagtgtgtttttaatatttgcttttgttgtgctgagaaagataatgatcatgacaagatgggatgatatttctaataatatgtgctattttaattaattttatgaacagaatatcgtaggtttgatgatttaattgtggtttgaacatgaaatgttctccatggtttcatgtgtttgaacacttggtctccaggttatgaaaatgtttggggaaatcatagaaccttgcaatagatccttgttggaggaagataatctgtagcggcaggttatagtcctggcccacttctgcttttctttctactccttggctgctgatcagtgtgactagctggcctcctgcttgtgttaccattccttctctacatgaatcatgctttctccacaatgatggaacacttcccaaactgcaagacagaatacatcttttcttcctgaagttgttacatgcaatgctactggacataacagacagacactcagaattctagaggcttcgaagtccaagactaagaacccacatcttcagggcagtgtgtgtgtggggtccttcttgctgcatcacaagatggtattggaaaatggggacaggagaatgtgtagagagaaacacggttttaaaagaggtaatgttttttgtgaaccatttctgtgataacagaatttactaatgggagctcagttaatatcttaaaatcgatacctctggatacagttgcactagatattacatatgttaacattatgcactctgggggcacattcagaccttcactgttgtgatatttaatttcagggttcctaagagcaagaaaaattggttctgggggagaaaagagcacttgagatactgaaactatttttcttatggacaccagtgcttgttagaatgtgtgcagttaattcacatggctgcccatttgtgttgcaacccaggacatccaaagttactttgaagcattaaaaagtgttggatgacacaatgaatggctattgttctttcttctctggaaacacaggatatcaacttgaaaacagagcctggattagctcttagtgttgagatggagttattacgacccatgacttgggtgaacttggggaatatgtcagatgtactgtttaaaaaataactgtcatatacttataatcagaatctaaaaattatcagaaagccaacgatgttgttctgtttaagttgatcaaactttgataatgaagtcatcaggttgctagcttgatagggagtgactgcaggcaaggatgtcagaggaaattagttcagactgatcagttctggaagagctgtgtaagcctgggaaacctcagaatcaggaaagttctcattacatgggagagtgcaaaaccgagaaggattaaaatgtagtttctgagcaaacaaatctcatgtcaggttactggcttcactatttgaaacgagaatggccacaaaagatgaccacaaagtacagaaagttccagcctccacttttcattgcttctttaattcttcctggcacttccagaatttacaaaatgttgcctcctctcaattctttaaaaatattcattgcccatttagtacgtgtcagggtccaggcacaaaaagcagcatggaccttagggaaactagaaagtggtgttttaaactcaggtttcaaagttcaagacagattataattcacaatggtcctgggtcatcatgtctgccatgttcagtcttcttttcacaaaacaatctttggagaaatatgagatacaaaactgaaatggcatgactttactaagaagcctaatgcagctgaagtctcagatctgctaaagtgctggtctcagaacgataactatcttagcattggttaaaggagacacaaaggagtgggcaggctcacccattcacaccaaagactaatatgtcattgtctctgtgtgtggctttttacagattcataggtatggatagattcttcagttccatgaggtactttttaacttatgctttacttcttaaacttatgtcattttctcaagctttttgttatttaataatcacataaatattgaaagaccataattgctctaaatatttttataatgttacaaggcttaaatcaaacatgcatttaggctaatctgttccaaatatttaaagttatagatttattttactttactcttctaaatatttaattaaaacccaaacatcagacttgaaattacccttattgctttaaatattttatgaaaattctgttttgtccattgtagggtgactcctagtagcctttttctatatgttgaccaagataaaatttccacttgtgttatcaaagatagcgcagacatggaggcatataaataaacacttcaactagaatcaatttgggactgattcaaatagtagagaaggtaggcccatgctgtctgtttcagttcctccaccagggtacatcagtctagtaacaggcatgaagatttcacaattctgtggctctgaaataagtctgacagaacactgaacagtcagacactttagggcattaacaaagggattgtcaggtttttgcacttagtagggattgaattgctgaactcagttcctaactgaaacagcagcaggatgctaatgctatatgaacttgccccagtcctgccaagactttgaactgtggaaacccctttggataaagagtttggagtatgcagagattgttttagtagattctgtgtttataaactttatgacccctgcatctgaggaactggtcttcatgcacaaacatgcatgaatggactgttatgcttttggaggtaagttattttttagcagaagcatctctgcttggttgagaagagacatggaaatctgggtcagggaaaaaccatgatgcaatcgcccaaagaaaaattgtttcctttgtttacacaccatttgtttctaaaatgcttaaagttcatgtactgctttgtactttgagctatagtagtttcatgtcagggagagatgaatcctaacggtcaggattctgtgcaaatccttttcatagctaatcaggatagcctatggacatttaaaattagcacccactttgagtttagtcttttaaggaaacaacaagaaaaatatacaaaagttggccttgtggactatcctggatgttctgttcagcacatgccagaggctgtttgtgttgttatagcattgaagaactgcagaagaagcaataggtcctcgaagaaaaacatctcaaatggtgtcaaattcagatctccacagggcacctgttgctggtggagcttgaaagagtagaagtatatttatgtataaagagagacatgttccctgtgcctttaatattcttattatacagtgtctggtgtccctttaatgagtcatatgtacactatttaaataagacacaaaattataatacatggtcacaaatggtgattcgtgtgcttccctttcataataatgtctctgtactccaactgtgtgtgtgcatgtaggcatgagtatgattatgtatgtgcatgtgtgtgagtgtgcatgtatttgtgtgtgtatgcctgtgtgtatatgcatgcatgagtacgtgtatgagtgcatgtaagtatttatgttcttgttcatgtgcatgtgtttgtgtttgtgtgtgtgtgcgtgtgcatacccatgtgtatatgcatacatgcatacctctgtgtgtgtgtgtatgcatacatgcatgcctctgtgtgtgtgtgcatacatgcatgcacgtgtatgtgtgtgtgtgtatgcatacatgcatgcgtttttgtctgtatgtttgtgtgtgtgtgtgtgtgtgtgtgtgtgtgtgtgtaggtcataggacaggtatcctgctcaccttctctcttgtttgaaaaaaagggtttcttgtctgatgctgcatgtattaggttagctgcattgtgaactgttgattctgtctcctcctgccatcctgccatagtaacactgggattacctatgtgtactgctgtttggttttacattggcttggaggaatgcatacttgcatggtatgtgctctacctaattttcccagctcctaactctgctattttaaaaataatttggtaagataaaatgtatgatcataacattcaccattttgatgtaatctgtccaccagtctttcctacattcacaatgctgggtagccactacctttatcttgctggaaagcatttcctacacctcaaagtaaatctcatctctgagtggttccccttggcccctcccccaatagccaatctgctttgatatttcacctgcttcccccctttcctgatccactcctttaaatgtgacagttgtgtcaagtgtttttgctgactatgatctcatctgacaataccactctgcctctatatccaacatcattaagttgattctggagcataggacactgtctccctttatagtcaccaaactgccaaggtcagtctgctgtctgcctgctgtattatctacctggatgctctaccacctggatgctctaccacctggatgctctaccacctggatgctctattgcctggatgctctatcacctggcatggctatgctgcatctgtgtagcatgaactcagatttctctgtgcacatgaaaaacatgaattaacaacttcttcattaattaatatcagtactctgtgcctaccaccatgattagagaaaatgcttaggagaggggaatttgagtcagaagcaagtgtcagacttgattttgatctctgacagtaggtacattattagacacaaactaatatgcccctgctgtctgcatacagttttagtgccaatatattatcacttccaaaaaaggtacttctgaaggacaaagttttaatgtctccagatatactggatagcatttgaatacaagtgaattttatgtttgtttaaattcatcttagaaatttgaacaagtataaaatttcatttggaggaataaaaaagtgaggtgataggtaacttctgacattaaattgaccaaaagttctctgaaggggaaaggtgcaaaggaacagggtcatatcttcagggtcagctctcagctattccttcccacacacatctgagtataaaaccaagaaagactacagtatgagaggatgacaatgtccagaattggattgctacccagaaggacaacttgccaatctgtataaaactagacacataggaaccattacaattcattacctaagaaccaatcaagttctttcctaatgattgtgcttgtttctgatgggaaatataattaccatttcatccatcacatcacactatattacatgagaattcaatctctatagtaaaactggaaacacaaagtaaaggtactgtgtttctatcaaacacacaattgacccaataaaaaaggctgggaaactcgagaagtccaaagaacagaggaatctgaaatctaggagaaaaatcaagccattcctgcccttcagggttttcagtcttgatggacacaggtttgagcagccaggaaataggagcagtaaggattggagaggacacaggacttgatccccagatttcaataacttctacccacccttgtaacatgaaaaagaaatggtccagagactgaatattggagttcaagcttcaagctgaaaatggaaaagcaaaggagctggccaccagtttcttacctttaccttaggctgaaagggctgattctggctccaccaagcctcagactgtaatctctcctcagcatggccagagaatctggggcttcagtgtcttcctatccccagtgtggctggagaatgaatgcctgacactgactactaaagaccctgctcctatcttataatacctgcttaatgctgggattaaaggcgtgtgattccagatcccaaggtcatctttgtgtgagctgtttctctttagaactggatcaatcttgtgtacctgcatagccttggacttacagagatccctctacctcttaatcctgagtccgatgattaaaggtgtgtattactacttcctagcttctggctgctgggattaaaggtgtttattgccattgcctcatctctatagcttgaggctgactttgctttctgaatccccaggcaagctttaataaatcataaataatatatcaccacacactcaagaatgtaaaaaattttaaaatatgttctctaaatgactggatagggtcatggttatagcatcagccaaggctacatggaaaaagactcttcctgtcttggcatttgataaacaaagatgaaattcccttgtcagggtttctggtgtttcagtactgaacactgtggtaactctcaaatgccaagaaaggggtatcatgttaaggacacaatgttccttcttcccatacagtcatccagcaacagatataattccatatcttacatttagttatgataaagtgtaagttaagaacatttacagaagtctcagatctgttctctttgcacgtatggagatctttctgaaagcgtgtagtattgtgcagttccctatttaagcaaagggactgtttagatattcagactttggcagcggttgctgttgtgactgctgaaacatatcctcttccaaatgaacctgcaaaggccattgccaagtcctctgtttaaacagatacttcaaagttttcattaatgtcattccagagtagaacttcagactttcttttcttttttctttcttttttttttttttaccatttatgcataaagatatagtataacggaaagctctctggaatcctttggttaagcaatgacttgaaatagtgtatcttggttaaagcaacataaaaaacaataaatggagcgttagaaatcattggaagtgtaaataagcctgtagaaaaagaaagttgttgaaatacaaaatagaatgattgatctaagcagcatactaaggacatctggacagacagcaggtaatctatggacctgataagttaattaaggaggcagcacaagggcaggaagacagagaattttaaaataagtaaaaaacagttacagtaaggttcttcacatgactagtgaaaataagaactaagaaaactgcgaagtgaatgagggtaatgaaatccaggtttaagtgtcaaaatgaatgccagagaaacacacttagtcatatcatagtaaaaatgataatgacaacacacacacacacacacacacacacacacacacacacacacacaaagagatcaatagctgatggctgagaaaaaaaatgtagcaaagaaatatcatttaccttagaattttagggaaaaaaggaagagttgcattaatttctggttctgatgatggcagaaccaataacttgggctggagccacaagctaagaacaaccagaaagactatgcctacttgcctgttgcattgctgtcctcaccattatagactcttgaactgtaagccaaaataaacttttttcctctaaaaatttatatatatatatatatatatgtatatataggtaaatacatttatacatatgcataatagtcagaaaaatattaaaacaaatctcttaagtctacaaaatgtgctacttatttttaatacatttttatttaaattaaaaacaatcttattatacataccaagcccatttccctctttctcccatcctccaatgcctacccaccaaccctgcattccacctcccatacactatccagggagggtgaggcctctcatagggaatcatcaaagtctgtcacatcaattggtgaagggtctaggcttcctccatgtatccaggctgagagagtatccttccatagagaatgggctcccaaagcccatttgtacactagggataaatactggttccacttacagaggccccatagactgcccaggcctcccagtcaacacccacattcagggagcctggtttggtcttatactggttccccatctgtcagactggggtctgtgagcttccacttgctcaggtcagctgtttctgtggtttcctaagcatggtcttgaccccttgatcatcattcctccctctctacaactgaattccaagagttcagtccaatgctgattagctttgggtctctgcttctgcttccatcagctactggatgaaggctctatgatggcatttaaggtagtcatcaatctcattataggggaaggacatttaaggtagcttctcagatattgcttagattcttagttggggtcaactttgttgatccctggacatttccctagtgccagatttctctttaaacctgtaattgctccttgtattaaggtatctctcctctattctccccccccccactcaatcttcctaatccctcatattcttctccccctcctcttctctcctcctctttctcctaccccctatgctcccaatttgctcaggagatcttgtccttttccccttctcttggggaccgtgtatgtctctcttagggtcctccttgtttcctaccttctctggagttgtggattgtagattggtaatcctttgctctatgtctaatatctacttaagagggagtacttaacatgattgtctttttttttttttttttgattttttgagacagggtttctctgtgtagctttggagcctatcctggcactcgctctggagaccaggttggcctcgaactcacagagatccacctgcttctgccttccgagtgctgggattaaaggcgtgtgccaccaacgcccggcaccatgattgtctttatgtgtctgggtttcctcacttaggatgatttcttctagttccattcatttgcctgcaaatttcaagatttcattgttattttttctgctgagtgtaaatgtgccacattttctttatccattcctcatttgaggggcatctaggctacttctaggttctggctattataagtaatgctgctacaaacatagttgaacagttgtccttgttgtatgattgtgcatcctttggatatatgcctaagagtggaattactggatcttgaggtaaactgattcccattttcctgagaaactgccatactgatttccaaagtggctgtacaagtttgcactcccaccagcaatggagtagtgttcccctttctccaatcctctctagcataagctgttataggtgttttttattttagccattctgacaggtataagatggtatctcagagttgttctgattttcatttccctgatggctaaggatgttgaacactttcttatgtgtcttttagccatttgagattcctctattgagaattttctatttagttctgtaccccacttattaattggattatttggtgttttggtaactagtttcttgagttctttgtatattttggagatcagccctccatcggatgtagggttggtgaagagattttcccatcctgtgggctgccatttcgtcttgttggctgtgtcctttgccttacagaagcttctcagtttcaggatgtcccatttattaattgtcaatttcagtgtctggtgttatgttcatgaagtgggcctgcctgcacccaccaggagagctgagagtggggccttctcctgcctacctttccccctccttggagtccccctcctttggagtccttcttggagtgaccaggtgactgcacatgcacccatcttgcctaccaaatcctccagagacatgggggcagacaaaaccatccagtgcctgccactattggagtcttggatttgcctgctcccactcagagagagcagccatggacccatacccaccaggagagggagagaccctagatgcacccattggaagaagggattggaagaagacagtataagaacacattcaacaacagatagacaaatatgacaccaccagagtctaggaattctacatcagcaagacctaaacatcccaaggcagatgaagcagaagagattgaccttaaaacaactttatgaagatgatacaggccctcaaagattaaatgagaaacttccttaaagacactgaagaaaaaacaaaaaaaaatgcaagaaatggaggaaaagacaaacaaaaaatgcaagaaataaacaaaatcttaaggaaagcaaggaaatccaagaaaaaacaattcaaatagttcaagacttgaaagctgaaacagagaaaataaagaaaacacagactgagggaattctaaaaatagaaaatctgggtaaatcatcaggaactacagatgcaagcataaccaacagaatacaagagatggaagagagagtctcaggttttgaagatgcattagaggaaatagagtcatcgaccaagaaaatctcaagtccaacaaatccctaacacaaaatatctaggaaccatagggtgctgtgagatgaccaaacctaagaataataggcatagaagaaggtgaagaaacccagatcaaaggtgcagaaaacatattcaacaaaatcatagaagaaaattttcccaaccgaaagaaagacataccaatgaaagtacaagaagcttatagaacaccaaatagattggaccacaaaaaagtcccctcatcacaaagtaatcaaaacaccaaacatacataataaagaaagaatattgatagcagcaaaggaaaaaggccaagtaacatataatagcagacctatcaaaattacacatgaattttcaatggaagctctgaaagccagaagatcctggatagatgttttacaaacactaggagaccacagatagcagcccaaactactataaccagcaaaactttcaatcactatagatggagaaaataatatattccatgtcaaaaccatatttaagctatacgtatccaaaaaatccagccctatagaaggtactggaaggaaaactccaacccaagaaagttaactacactcacaaaaacataggcaatagataatctcattttaccaaaagccaaaacagggggctggaatcaccacacattatcaccaccaccaccaaatccaaaactaacaagaatcaacaatcaatggtcattaatatccttcaggatcaatggtcttaactcacctataaaggaacacaggctaacagaatgggtacaaagcagatttaaaacatgtcaaagagcttacattttatcttcagaggaggagtgggtgccgttgaacagtcacccacaggacctggacttcacagagtttgtcctaatttgtgaagaaagggggagtgaaggaagattggtaggttgctcactgactctctactctcttgcccctatattacatgtcaagtgttcaataagtatattggggaactatccctttaaataacttcctttcctgtagcttagtataaatatgcaaaggcaacaccttagaaatgtccattccatagtttctcttaatgctgaatattttctgtaagaaaaaacttgctatcaattatattcaatcaccaagcatttagacagtgtagagaaagacatgttaaagtaacatttattttgactaaggacttaagtaacaaactagcatgaccccaatcattgcatattggcaaagtaatctgaatgcagcattgctcaacactatgctggagcaaggttttcactaagcaataatccatgctatcagtcatttcaaaggtcatacattgtcccaacttgcaggacttcaacctggggcaagagagtcagggatagggaatggggacaagagacatagaaagaaggaccataagacaggattctgatcaagtggcaaactttaattttctcaggctagtttatatagtcaggatatggtgatgggtagaatgggttgtttgtgcaccaggtgttagtataggcaggatattaggaagccacaatgaggatgtttggcagggtaaagagttcatgtgcaagaggtccaggaaggggttgcctaggtgactgagcctgtggaggactgggtcaagttgtttcttttcttgagctgaggttctaaggagctgctatgtaaaggttcactatgtggcctgccaagcattgcttaggatctcatgccaagccctgagatttggctcccaacaatacattcagcttcctaccccttcttttcacaaagttctttgtcatcgtgatgcctgatcactgaaggactcaccctcagctttgctgtccacaatgccagcaagtgaaatcaccagttgcctaattcttggctctgaaacaaagattgttcaaggaaagctgaaagctgcttagtagtgaatgattttaacagggcaaacaatgattttatgtgcccacagatatggttatgggcataaactgtccacattacactaaatagagagtaagtatcctagtcagttgtgatttcatcatttacataagtatttcttatttttctcatgcatggcaaaatccctgacagaagcacctggaggaagaagggcttattttgactccagtttccttcacatttaggaagcagagagtgatgaatgctgcttctctgcctctacttactttatccccggccaccccccactttggatacccagtccttggaacattgccacccacattcaggatggttttctcatctcaattagtctaatttaggaatctccacaaggcatgcccaaagatttgtttgcatgttagtttcaaattttctttggttgactatcaagattaattgccacattatgtgcaatagtttaagattttaaagtgggaaaacttagtgcttaatttggtctttctacaggtataattgaatcccgatcatagtaaacacatacttaaaaaccattgtgaggatatgaagtccgcagaatgcattcattggagatctgaaaagacaggcccatcagctcacactgtttacaactggaagtatacaataataaatgacaacttcactcctctattactcagccccatattttctgcctttgtgagatgtgtcccagaaccctagttgctgacttgaattgggatactatgtacttgagccagaattttgagctaactgttgggaacacatcacttgcagtgatgtatcaacatatacaacagtaaacataaaatatcattattcaacataaaggacaaaaagcatctttcataacattcagaaaaggtacttgataaaatttagcaacttttaatgatcaaacacctcagcagagagagcataagaagttgttcctcaactcatcagattcatagccagcatcataaagaatggggaaatgtgagttctttcctttagaagaagacacaagccaggatgttcatttccactactctcattctgaagtcttatccagagcataggcaaacaaattaaattatgggttttgaattttaagaagtggaagtcaaattatcctcatttgtgagtaacatgattttgtagatttcaaaacaaaagacttcacacttctacacacatacagaaggaaaaacaaacttagtcaaattacaggataaaaacatcatatgaacatcagtagcaactttatattataatgaactttctgagaaaaaaatatttacgagagttagatgatatcaggtacttgggaaaatcatctgtattccagtcacttattgcagccattggcctctatagaatccctgtgctttagtatccctcttgtgtttagcagtgtcaataactaggtaaattttcattggtgtaagtgaagattcatcagatatactcttttgtttcctggtcagtaaatctattttgatttctcgaattattgtttgataagattataattactggaaaatattaactaaagttattcattcatctattttctgattagtaggtagtatctaaattaagggtgattaatgattcctctcaaaggtaaacagcctgggttggttcacaataggttcctctaagattacagaagaacctgggaaggaaatctgtgaatattgatggcctgcaacatgactatgatctaggtggagaaaagacccgaaagaagctggtgactgaccttccaagaacacaacattgacaaaaactatttccaatgatactaaatctcctgaacttttatttaactagaactttcttaaccagcacacttaaatggttactcaactaggcagggaacacacgaacccagaatcctctgctcaaccaagagaacatgagaatactcatataacaaatggtcaaacacataaataaataagtaaccattatttatgtgatatgtgttactaacttccaagtatttgattgttttcatgaagtaaaattctaaaatgagaccacagatcagagtgtgttgacctctcatccaattttccagtgatactattgtcctctggaaaatactattgtccattagacaagggccagtgctctgaatttgtgaatgtgccatgcttgaacagggaagtatcacttgatataaacatgaactgtgtgagctatgcttctgtttgttgcagtgtaactcatcatctatctgtgaatatgaggataggattctgcacaaaaagacatttccatgataaaactaacaaagttacctatatactgcattccctgctgaaaatattcagatgtgtatttcattcatcatgagttcaaataatcatggattaaataattgaatgcatttgaggttataatagaggtaatttgagggagtagaaaagagttggtgatcctgcatgaggagccagtaggctgtgatgctctgatggtgctctatgtccaagtggtggttattttcattttccaatatagctattttctgagttgtactctcattgtttttaaacatcctataaatgatacatacccatgaataggtaaattctgtaaaattatctactaaagagtttagtaaatcataaaggaggggaaagaccaccatccatcctttaaatctcaagtcagattcaacactgttcaccggggctcagcacgaagctggagtccatgtaactcacttatccactcattgattaaactaatgtaattaaagttataagcacggaagtggagaagtagaattacttctagtaaaatgacacacatgttgtaagataatatgtgcataacaaaaatatcagaaacatggggcagttacaaaatatcttaaagcagctgacagcaggcagagtaattagtggttttactttctctctttactattgggaaacaatgtggaaagtatagataaaacactgagtgttgtgttggcaaggtaatttcaaattccatacaaaccaagttccaggagatggccttggcctataaggtttaacaaaatgttgttaatctcaaataattataaaggttttagtccatagttaattttagagaccttactatccagtgagaggcccaattgcattagatgcctgtgatatctatcatatattagtaacaaacagaaggacaatattagaatatgtgagaacccaaaaataagagaaaaaaagtttggtgaaatagataagactagtgggtgaacagaaattagtgtacatatgcatacatttaattccatcagtttttagcatccagtagacaaccaagggctaaaaccctgaacaggcataagaatgatgcgatagcagagaaactgtggtcattaagaaatgtgaaaaatagtcatcatggagctaactcaaccatgatgacggaagcagtagtttgaggggtgtggcatgaatcagaacaagattctgagtgtcgtgaaccatccagaatcctgaaatcaaacaacataaaaagaagttatcagagtccatttatgatactacaataacagactagagattgttcttaaaaagaggtatttatacaatggagtactactcagcagaaaaaaagtaatggaatcatgaaattcgcaggcaaataaatgggactagaagaaatcatcctgagtgaggtaacccagttacaaaagacacacatggtatgtacttactcatatatgaattttagacatagaacaaaggattaacagtctataatcctcttcaccaaagaaactaggaaacatgaaggactctaagggataaattcatggactccaggagtgggaaggggcaggaactcctgagctaataattgggagcatgagggtaggggagagggagctgctggaggagaagaggaggagaagaggagaggagaggaggaaatggaggagcagaaatattgagttgggggaagaatataggagagcaggatgagagataccatattagagggagtcattatatgtcccaggagagatctggcactagggagatttccagagacctacaaggatgacacgaactggcaatccaggcaatggtggagaggataacctaaacaccctttccctaaaatgagattgatgactacattttatgccatcctagagccctcatccagtggctgatggaagcataggcagacatccacagatatacactgaactgaactctggaacttagttgcagagagggaagaatgactattgaaggggttggtaccagactggtgaaacccacagaaacagctggcctgaacaaatgagaacacatagacctcagatgctgtctgggaggccagtacaggactgatccagacccctgaacatggatgtcaatgaggaggcctctgcactccagggggcccctggtagtagattagtatttttccctggtgtaagaagggactttgagagccctggacacatggggaagggcctaggcccagcccaggatgatgtgatgaactttgcagagcctccgttgagggccctaccctgcctggggactagagggtggatggagtcagggggtaggtaggggatgggggaggaggggtgggggtgaggtgagggagaacgagaaggcattgacatgtgaaacaagcttgttcctaatttgaactaataaaaaaaattttaaaaagcagtatttagtggatatcttttaaagaagaggtctgggggctaaaagtcagatatcagagttctagcatgatcaggctgtgtgggaacctactctttggtagcagactcctgacttcttggatctttacattgaagatattgactggcgaagctggtgacatagcgagatgttataatgcttgcctagtatgtctgaggctctgggttcaatccatgctaccagaagagaaagagagagggaaaaattcaaagcaatgagactgggagtgggatcttccttataaattcactaatctcactcacaagggcttccccttcatgacccattttcatcccatagacccctcttctcacactatcacattgagggttatgatttcaccacatgcactttgagaagaagcaaatatttggcccattgaagaaaagttcatttcactgttcagatatgttttatgacctaatctcactttaaaatttctgttattcgtattagtagaaggttcaaatactgatataagtaagagcttttatctcatcaggaaccacttcttgaagggagctctatactgctgttttgcctgaagagctagtttcagtgatggcagaagtcatggtctatacatttcttggtataaatacagcattaacatgagttatcgattaactataaccctatatttctttgaatgtgtgtgtgtatgagtgtgaaattgagcttatcattgagaaggaaatgattaaatattttttgccctggaccccatgttaaataaattaacagctctgccatcaaatgaaagctctgggtctaattttgaggagggcctcccaggttcccattattttactaagccttatttttcctctttaaggggaagaatgaaagaaaaagtttttggcttttataactatccttagagataaaccattgtataacctcagaaataactgtcatagtccagtattgagcaaagaaaaaccatcctggcaaagggagtggacgtttaggaatgcatgcataatgcttagtaaatacttgttgaaaattaaagggaaggcatggtaactgcctccaaagtttcctttactacaggcagtgattcttggtttcaggagtacattattgcatatttatctagtgaaagacagtgaatgatttacccactgagagagcaagaaggaatgccaagaatgtttcataccctgtgttatgaccttctagacaagtaaacaaattttgaacccacaaacaactgtgactctgcaaaatgcagctgtttgggcattgacaagagcactagtctgcatgttatataacagctattgaacaattgtgcatttaactcaaagggcattagtaaaagagaaaacaagtttctaaaatgaaaagggggaagagatagagagagatagagatagagatagagatagatggatagatagagagagagagaggagagagagagagaggctggaagaacagaagtttctatcccaattcaagtgatccaattgagaagtttcaggtactcaaggacatctaaaaggtacagtattagaatctagaagaatgttctgtgctccagacctgacttgtctcctatttttccccaatacaattattataaaaatacaatcatttatctatctattcatcagctctctattgttccttctaatcagtgtagaccaaattacaacagaattgctaagtcacaggaagatgaaaatgtttcctaagaaaaagtttgccattccctgctcagatgaataaaagcttgaacataatttctgtgtgtgtaatcacttactcaaagacctcaagctgttcttgagcctatgtgaggatcatcttatggatatcaaggcagaactggaaaggaggaataacagactggggaagctttgcctgaagtgagatttcagtcgtattctgtgaggtctataaccacaagctgtgttcctctctgtgtttacaaactgagaagcttaggttagggtggaaagagaaagaggtttcccaaatccctgttcctgccccgatgcaggggagatgacaactgtactacaaagaagttgtcattgttccttcttaataaacagagtatccaaagagtgttatcttgttcctcctctgctatagactgcagaattatgcagtgagagcccagctgacaaatcttaccgacaaggatcaaacattctgatgaaggaggcccacactcagggcagtgggaaaatttgctttatgaatagtcaccgtactaactgaattccctgtgaagccatagtgctccctttctatggtgggattcatcccccaaactctagcagtatacaaatcaattactgggcacaatttcttctatgtattgttatattgtatgagtccccccagctatgggtgattctggcaagaaagtaatcacatccaatacctttactctctcaaccagtctttgtataaacttagaagtctacccacctgcaattattttccttgacagaaagttggccagtattagtgtccaggcaaaagagaccactactgtgacattcacagatgcgcaaggacaagaattacagcatgtctgaagttgttgagctatagctttcagaaagatagagaataagaatgtccttgattcaatgtgacagcagacagggaaatgctgtcccaagctaacctctggaattaaccttaaagcaaatccttaactctttgtacttatttttaccatggtctatttgctagtcacatttaagaaaatagaaaaagcacatgtgtatacatattcccttcttagatttccttaatgattgtcccccctccctgtctctctctctcaacctcttttcccttgaagaagttcttggaggctttaaccattcctatcttgagccatggagaaaagctggcagttactgctttgtgtaaaacttttatctgtttctatgaccctgaaaaactctaaccttgtacagggcaagggctggagagacaaaatgagggaggtagtagctgaagggagaggctggtagaagttagcagcaatgtaaaaggataaaaatgtaggaaaaataagtaggtgaaggaagaagaagaagaagaagaagaagaagaagaagaagaagaagaagaagaagaagaagaagaagaagaagaagaagaagaaaaagaagaagaaaagagtgagacaggggttagattagaactcagaaattatagacaattaggacacaagaataagaatagggaactgtaaagagagaacaataatgatcacatgtatagaattaatgtgttgtgaggagattctcttctgaagccctcatacttagatcctatgcttattgtaccatctctttttgacccctgaacaaaagcttttgaggctagaccttaaagctttggatgctcccctaacttgtgctggaatgtcaacacagagaagcattatattcaaaatgaaaatgctacagttaaaaattgtcaaaacattcagagtttaaatgcttaggagtactattttcagtctttttttgtatactgcctagtctctaatggaactgagtggttttcaaccttcctaatgcttcagtcctttaatacagttcctcgtgctgtgctgacccaaccataaaattattttgttgctactacataactgtaatctttccactgttatgaattgtaaaataaatatctgatatacaggatatttgatacatgaccccctagtgggtccagacccacagattgagaactgtaatttttcacaagtgcataacctcccaaaatctgacattacttttactttcaaagaattttcactttcgaagaatataatgttctttgatggtctgtgagtgatggtgaactctgacagaaaaggcctctacaattttttgttcccaccgaaaagacaaagataatatgaggctcctgttagacactccaactgcttcccagactggaaatagacctgactggctaaatttttaaaggtggtcaaaaacagtccagagagggggcctttctccccagaagcactctgaacctaggacaatgatgtatattcttgcagctttgacctgaaatttcatggtcttgtcctcctagctcctattgagaacaagaacattttcttttcacttcacaaatacccagactccccatctgtcagagaagagaaaattacatggtaacataaaaagtcatgaaacaccccaaatattataactggctttaagtgcccagagcagttagttgtaagtactctcttagcaagagtttggctttgtaaactaattcatctgtaaatagtgaacaatctccagatggaacttcagggctgaggtacaggtaggttccttaaggatttatattcaaaggcaaaggctcccagcctcaggttttagaagacactagtgtactttctaccctgccctgagtctgcccatccaatcatatcccatatgcaaatgacccttcgtacatgcagataaaaaggagcaagggctctatcagaaccaaattgctgagcctgtcacctgtgttccaggagctaaaccagcaatgtcttcccctgcacaacctgaagtccctgccccgctggccaacttgaagattcaatataccaaggtaagacacttgcaaacagggctttccatggattgtggcttctgtaagagctttctgcaaacataaaaatgaaatgcttacaaagttagtgggctgattcaggggtaaattctaaaccacaccagacatatgcacaagggaagcagatttccttctctgagaatgattcttgtactagagtgctgtgaagcagagtcagccacatgtcaattaaccctgtgcaattagcacttacagtaaggcagacaaaaagaggaacttactggaaggatccaggcattgagctctctctgtctctctctctctgtctctctctctctgtctctctctctctgtttctctctctctctctctctctctctctctctctctctctctctctctctctctctctctcaatatcacaccaaaacaggataacatgatcatatgtttgttggcagtgttatcgttggaggacttaaccctgaacattgaatggaggctgctgccaaaacccccaaatggacttgagatagttttcttattttgagattgaaatggtacttgtttatttgtccagtcaagtatgctgttgttggagaaaacataccattgctggctgctaaatatttagagacacaagagcaggagcctgactcaggcttagaaaatctgcatccagggagagcaaatgattaggctaggtttgtgaggagggactctcaaaattttgcctactgaatgatttaatgcctacttctgtcacagatcttaggattccaaaattaagaaaaacatattacacacacacacacacacacacacacacacacacctaaccaagatactaggaaagtcacttaaaattagctatgttactgtatgatgtggtaaacaaagtgagagacaactgttcaactctgcagagaaccatgaactaaacaatgaaatccaagagtgctcaaggtaatgagaagagcccgatgccctctctcatttgtttctttttccttgtgagcaaacatgggtggttgtgaattaatgaagcctgttcattatctcaagaatctgaagtgagggagctgcctggcttatgggtcctttgcttaggacaaggtctgtagagaggagtgagccatggccttggcctacatgaagtgttttcaatttagatcttgataaagaagaatatggcaactatgatgggtacacactgtccaacagctcacagttgtaaattgttcatgtacactatagactctgtcccttcttcccatttggaaaaaattcctgtcacaatctacaaatcaggtggttccttttcaagttttgaactgtttcctgcatctctctcttttttttttcccccctgggctttctttaaaggatttattgatttctttcattttttgtctgtattttcctccacatctttaagggcatttttcatttcctctttaaaggcctctatcatcttcacaaagttatttttaagggcagtttcttctgcttcatctgagttgagatgttcaggtcttacttttgtagaactactagtttctggtgatgctatattgctctttatgttgctgaatgtattctttttttttttttgtattcttacactgctgtatacccatctcttcctccaatcagtgcaggggggcctgtggctcctgaggatgctgaggcctttgaggatggttgacaggggtggggtgggatgtaggggtgggggtggggatgctcagagatcaggtattccaacaagatgggaattgtcggcactgcttaggtagttacattttagtcactaagaagagtttggcaagatattttggttgtcaggatatccctcctcctttctttaagttgtcttttatgaattttgaccgtgtgtgtgtgtgtgtgtgtgtgtgtgtgtgtgtgtgtgtgtgtgtagctcaagggagttttaaagtaaactatctttcctctgtgttgtttcatttagcacttattaattaaaaatgaggtgaaactactagaaaaatgaggtgttccttaaagccccatgtacaaggacaggaccagtaatcccctaacgcagacagatgtttccagattgaaacctcttcactgcaaacacattgcataaggacatctgagacggaatggagggcctaagtatttaagagccaagaatgaatttgtttgttgttcatgtacttttctacttaataacaagcaatgccactcagtgaattttgacttttccatgtattcactataaagtctggtctactcagtaagcattatactgtttgatgtgctggttatagctttttcacacttgggggaacactagttatttatgcaattaaatctcaatggggagctttctctatgcctgtgcgtgttccgcttattgtgtcccactgaagacatgtgttagtttcccactccctagaggggttgaaacaatggctgttaactcaggttgcaatgcatgaaaggtaggggttagaagtatttgtcaaattgctttgcctgaccagtgtctcagtttctgtattattttccttactgttttaattttcttctttattattgcaaggggcatatggtattgataccgaggaaactcagggtcctctttggggttctcagtctcattagtggaataatttatggatagaaacaattggcatttggaagactattcttataatttacaaggaaaacccaaaggcaagtcagacgtaaaacctcagcagctgcccaaaggaggagattgggaagaggaggggaaattcttgtcattcaaactggcttggaaatggagcatgtggacaaaatggagccacaaggaagtcacagaagtttttagggaaggaataaggaagtcaaaggtgttaggagaaaagaccaaactgtaaagaaaagcattctcagaagagagatagagagaggaaaagggaaagttattcttttccgaataattcagaaaagtgatcagacttatcatgctacaatgctgtggttcaaacttctgcattaggggtgtggcttctgggaaggaaaagtacagtatctcattaaaagactatttaatacacttatctctttagtttgtcttaaggtgagctcagcttcctaggagtagttccttgttcaaagtgattgtaccagcccaactgtaatgttaagtttccatctaggtcagagactctattcttttcaacaagagatattttatactcttaacagtgtttggtgcacaagaaagggaacacacaagcagattaataacaaaaagagaaataataacaactttagttagagatttatgttatcttaaccttcggagtgtttttttttttttttaaagtttgatatctttattcagaaaagtgattcaactgcaggaggatggtcttttgagaggaaattccaagtcttgtactcagaaattttgtgtatttcaacatttatagtcctgatgagattcttctgtctggagcttttcatgcattcaggtactttgcatgatgcctgatggggtcagtgatgaaggttgcaatgaagcagtagctatgatcataaccctcttgcagcctaaaaacaacagggattttcttttctgtgcaggtagctatgaagttatcagggagtaactgcccatttgaaagaaactcgtcatcttttccttgatcaattaatatgttaatctgggaaccagaataggatgtcatgagagaggttgcatcatatgccttccatttacattggtcccgaatatctactaaaagcttttttgccccaacaacaaagtactggcttgcacattgaagcacatgctgacacagatttgcattttccaggatttttcaaatcacaaatcagagttctgtggcctcccatggagtgaccaaaaatagacatcctctgagggtccactgggaaactggcatttatgagttgtggaagctcctcagttacataagaatgggtttctgtgaggaaacctcagaaatctatgggacctcctgtagaagcccagtatttatctctagcataggtgtggactttgggagcccattccatatagaggaatactccctgagccaagacacacgggggtgggcctaggccaaaggatacaaaagactctgatgacaccctatggaaggcctcaccatccagggagagcagaaaagatatgtaacagataaggttttagttggggggggtaagaggaggacgggtgggagatgggaactgggattgtcatgtaaaacaatcctgtttctaattcaaataaaaaaagttggaaaaaagcaggaataaataaataaataaataaatttgacaagaaaaaaaaataaaagaatacattctgtaattagttttccagggatcttcagtggcattcatgtaaaacccagcatcagtgccaaagtcccagctggcatcttctcctttaatattgcagccatggaggctggtatctggagcaatgatgacaaggccatgtcatggatatggccagacttggatatgaaattctgttctgtgcaagttaaaccagatagccagtagagtgcaggacactttccactctctgcctgttgtggtaggtagacagcaaatctcattttacatttcagctcaacactgtcatgttcaaaaactttctggagcctcccaaagcacctgttgctggaaatctgcttcaaagccattcttctcctgtttagttactacttgttctttctgtctgcaccaaagggcagtggatctcggagtgtttttttttttgtgcacacaaaacaagccatcaattcatcatcttttcagcacttattccctagttcagtttctctttgactggggtagatgaaatggagtttagcatttaagaactattggtttttaaaaagaaactacaaaaccttttgcatttgaagcctttataactgtataaatccaagtgcacccatcacatctccatccctgtaactccttaggagcagtgagtaaatgccacaggggcccttcttccttgctattgagcttttgcatgaagagcttctttggaagttatagcgtcactggccaaactctatcatctctacctgcctctgctctcttacaattacaatgggattatgtggagtcccatttccaaggaggcataacagccagcacatttaattggtaggaagcactttaggcagggtctgggaatgatcaacattaactatcttagtgcagtctattttcctagaatattcttacctgacttttccaaggtctgcttcccaccttgtcattctcctctcctttctcctgattgtctgtccatgtcttgcacagtcatgccctgtctgacaaagacttcaccaaagagaagttctaagggtcttccaaagatctcaggggtgaagaattttgtttcttgggatttttgggggtgggtcttacttctctcctgtttcacacactttaaacatttgttgactaggaacaactgtgattccagttccaagctagccaaggcccactgtcatcatgtgcctgcacacatgtgctgtgcagaaactcatatgggtaaacacatatgcgtaaataaaattgcacatatctttaaagaatttaagttatcaagtgacaatactttctatgctcaaaaatgtcttattagctaataatatttttgtgcatacagggaataaactgcaatacttctgttagctttcctcacaatggccctgttacaaggataacatttcctttataaggaggaaggaatggagtcaaatgcacatattgaaaagcaagttcagggtgcaaatattgaaattcagacttttcccagtgatctaagggtgcttctcctagttactatgtcttaatgacacacacctgaattcctaattgcctaacttctgtttctttaggtgttaaatgtcagacacacatgaactttttttagactgggaaagacacataatatttagacaacatttattacctcagtgctagtttatcaaaacgtataacttactacgtatttaaatgctatttatctgtctttgcttcatcaccacagatcttcataaacaatgaatggtatgactcagtgagtggcaagaaatttcctgtctttaaccccgcaactgaggaggtcatctgccatgtggaagaaggagacaaggtaagtttcccagcacccataggttcagttcatgccaggagtctctgtgtctcattgttctgagcataaagcccattgcaagttcaaagaaagacgtgaaaatatgatttctcaggcagttgtgtaaatgttctgttgtccttggcataagaaaatttgctatatatacatctggtagagaataaatataatgcacaagagcttaaaaaatctccataaaattgaaagaacaagaaacagtaaaaaacataggctatagatccaatgttagcatttccaatgtctgggaatctagaatagggacgtggggtccaaaacttcaatggtctgaagctactatagcacagtgaagtatgaactattaaataacttgtctcctttcttgagggttagcacagcatttaatatggggcttggagtttcaatagaataacatatttagggtacctgtcagctagtcatgctttctcctcaacaattaaaatcaaactaaaaaaagaagactatgaatctgtagatgtcagctaacaaaaagttatattcttggtaccttaacattgaagccttgaccgttaagttcctgggggacatcttgctctgacactagggttggttccatcaggaaaagaaaattctctgcttgggttcagtggaaaccttgtcaagcaagctgaggactttgctaggagagtcagtgcagttcactattttcctcaggcgcagaagggaaaactggtgtccatcccaaaggccttgccagggagcacttgatctgctctgtgctaagtgacaaccacccttcctgtagaaagattaaggaaactaattcatacccaggcaagctgcaagccaagtcactgtgctaatctggctgtctggattcatttgaatcctctaaggcattgattctcaacctgtgggtaatggttcaactgagggtgatatagaacaacccttttacatgcatcacctaagactaatgaaaaacagatatttgaattatgattcagagcagtagcaaattgacagttgtgaagtagcaacaaaaataattttatggttggggccaccacaaatgaggatctgttttaaagggtcacagtattaggaaagttgagaaccattgaggtaaggaaattgtcagtaatataatctatgataagcaagaactcgcctcacaaccacactcctgtgtctgtattccttttggaattattaaacaaactgtcctttcagaattgttgatgttcaaacaatttgtgaggaatctaatgaggagtgactagcattgcttagagaaaggctctaacctggtaaaactcacagttgagtctgatatgttggactgactcaccaggtcacaggctaaagattttggagatgccacgcacaagcagagtgggattgacaatgggtcatatcccacctttcatggaatcacagtactgggccaggatccagagaaaatacatcttttttcacttcagtggctctgacttcaaaactgtagtattttattttccctaagccatagaatttgctgaaatcacaggtaacctaattactgttttctgtttaaatcaaaattatcttggaaatgccagcctctgaataaaattctactatttaggaacaatgaagtttttttttataaaatattacaaaaagcactatcaaaaacatttatgagacttgtaattttggatgataatgtaaaaatgtcaataatggaaaatatttatttaaagcatgatttgttgtataaatatcaataaaaataagtcatatgagtcatatgaatatatttatgtctttctataatgtctagctgtattgaatagcaataaattcacaagatttagccatttaaatgacagcaattttgtataaaaaacgcccatcttagtaatctgcttgaggagaatgccaattcatcattccagtattagttactaacattaactttcaaataacataccaaatagtgaacatatttgtccctctttaaatgtatatatggattacttgatgaatacaagttgaagagtctgcagtagagttcaagaggtctcagaagtggcttagaaaaaaatctgcaataaggaacccatcctgggcagaactgctgtgggagggagtggggtcaggtctgagagagaagcagtgaagctcaactgtgagatcaacggccaaactgggtcaagagcagaaaatagcagttcagacaggtgaatttgtgtataggcaggctgttgagtaggcagcttcagtagtagggacccaactgagtcaaggaatccacacacacacacacacacacacacacacacacacacacacacacacacactaggtatcagacagtagcttgttcagaggccttgccatcacagtcttaggtgtccatcactttatgaaatcaggcaagagacttgcatcctttcctgggtgtctgataacttctttctctgctttctttgatttgatcttgtatgccctcttacccacacatgttcatttgtccccagtatacctataggatgactggctttctatccccaggagtaagttatctgccagactgtgctaggtaggtggggtttggtggaattcctgggtctatgagggggcttccaatagctcaactggctcttgattattatctgctactgaactgggtgtctggtttccattgttgtagattgttatgtcaaaacaggtcttgaaagatgtgtaagatcttggaagctaatgggcttgctggtttgcaaagagaatttcagtagcaaaggtgagaaggatgactcaactagagtaggaggaatgtgaacagaaaacctgtgcaagtaaagtctgtccagaaaatgttggaccttgaaaaccaaacagagagctttgctctttgctcttaggattgttgatgaagccagcagttgcaaacatgcaaaggaatgtgataagataatgtaaatactacataagtttagcattcatgaatttagatcatctttccctgatttggggaacagttcttctgggatactaagggaggcctgtttttaacctagattttccattcccagaattccctctgtttgtgttttctttattccttctgtttgcattttccagtcttgaatagtttccgtcacctgtttgtttgtgtttttcttggctttctaaacatatgacacacttcataaatttgcatgtcatccttgtacacggtccatgctaattttctctgtgtccttccagttttagtatatgtgctgcagaatctagcgtgaggcctgtgtttataaataaaacagtgtaatgttcagttgtatgttcctcccctgtaatgagtatttcagaacaaactctttacctcactgtcctatcgttagccaactgacagaatgctatagagtggatggtcatttggatgcctcaaaactaaaaggagaacccagactccttttctttattactaaaacttccctgcctttagtttattcttggtcctgcatgattaaacatcttgtttgagaaaaggagagcaatggctaacatgacaaaactacaagaacaagtttacttattattttctgtaggcagttttttgttgttgctttgttcttgtttttttacatatatagttacatgatgtcttaaaattatttctctccatccctggagacaccagggaactcaagagaactcttattaagcaaaggccaatgacagaacactgaggagagggatcaacacagagctagtttaaagtgtgtggtttaaaaaccagtgttctcagccaggcattggtggtgcacacctttaaaccagaggcagaggcaggcgggtttctgtgagtttgagatcagcctggtctacagagcgagttccaggacaggctccaacacaatacagagaagccctgtctggaaaaacaaacaaacaaaaataaataaataaataaataaacaaaaatcagtgttctcgttctcaaggtgcattgcaacaagatgtagcccattgtccttttgatcatcttgatttatgaggttccatgagttggtgagtcttgtagataaaaagctgtagaatagtccttacatacctgctatttgcagctgatttgatgaatttaaaaaaaagcacatgacacagtaatggaaggagcggtggtgttttcagcaggtggactacaagagactagaactctgagtagagatctatacagtatgggagtaattgtgtcaaattttggaaggaaagtggctctggaaatttaaaggagtaaactaaagggaaaatgtagtggtgatacaagaaagctaaacggtgtgagagggacttttattctattattccattgtgcttcaattaatgctaagcagcatattattaacaaaagagactgtcttctcttcttaatcagggactagagtggatcacttcatgtgcaattgagaaatagaggcttatcatacatataatactttggtttaaatgtgaagtgttgaacacaaaaccataaatttacacagttgtcacccaggtggtggcactgttttgagaggctatggaaggttatggacatgagggtctaagtgcaagatatagagctgtgatcagagcatgcagcttataaccactctgagatagcctttctctttttgctttaacttcttcatctgtgaaatgaggaatagattttcctcacagcgttttctgaatcaaatgagataaagtgtataaattaactagaacactatctcaaataaaataaacactatgtcctattacaataggataaagtaacaactgttagaacagcacttctaggagtttaactatttgacaaggatatggagcttatttgaaatatcactcaagagcaaccattccagcatactatggtatgtagagtgtagactgttctggactttgggctaatgaagatctagcttctgtttgtgaggactgtgtcctagtttacaaggttgtggtgttggttttgatcatctagtattttgaatatcctgaattgcgtattctatgatttccaggcagatgttgacaaagccgtgaaggctgcacggcaggcttttcagattggctccccgtggcgcaccatggatgcttcagaaagagggcgcctactgttcaagctggccgacttagtggaaagagaccgcctgctgctgactgtgagtattcactaacaccaatgggagacagaggagatgctctggagggcaggcaccgttccaagtggctggttagttttttagagccagatcggcaaacttgcccctgcccttttctagaacttctcagagtccagaagccagttgtgctagacttattaaagctcttcatgctctcagggcctgcattttctaatttcaatagttacataagtcggtatagaacatggatggagggtccattccctttgttttttctgctttgaattttagtaaagccaactgaaaacaaagtggcatgcaggttgcaactcagagtaaatgttactagctttagaatcttaactgacaataagattcaaatcttctttttatcaaaactaccaacaattcagcaattgttgagaatcatttattccctaaggactctgcattgttcaaaacatgccaaaatagaatttatagctctgtaataaatgtattcaaactgaaatgttcagttgaaagtaactggcattgtccaaagcttagctctttttatttgtcttaactgcagagtaaaaagtgttaatttcttctgtgagcttgagagccatagagagaggagaataaatataagaaagtagacaatatcaaatctgtgcatcttgccaggtgacctcccagtagaatgtatcctttaaaatctgcttaaacaaaggggaagagaagatattgctaagaaaatgtggaacatcataatctttcatttttccttttacataaaatggattattttcttgtacaatatatcctgattatatttctcctccttctattcctcccatatcctcacccccgcatagggatccactccctttctgtctcttattaaaaaaggacaggtttctaagagataacaaccaaacatgacaaaaatatagtaagataaagttaaaactgtcattttgaagttgaacacagcaaacaaacagaaggaaagcagccccaagaacaggcataagagtcagaaactctcttattcacacagtcaggagtcccataaaaatactaagctaaaagctataatatatatgcacaagacattgtgcagacctgtgcaggccctgtgcttgctgcttcagtctctgtgagtttgtgtgcaccttgcttagttgatctagagagtcttgttttcctggtgtcttcctttttctctggctcttacactctttcttccttctcttccatgtggttcactgagctctgagagaagcgattgttgaaataattataaaaatattacccaaatgggaatttgtagtttaaaactctgctatagcaaattcccgatgaaagacacattcagatgacaagtaaaatcttgttggaactctgataggaagtagatactaagaatcattttcacagctgtgaacttacatagccagtgctcagatactgcttagccaaaggtacttagaatctgacagaaagattaaggggggatgggtttcaggcaatcagaatcttactacctctcttaccaggatcttgttatgtgaaggcaaaaagacatttgattctttcttaagttgttttcaaaggaacattagatttaagagtctttctatttccaaaggtctctagtacataagcactaaaaagattgactatatattcttgatctaatttttattgttgaaagtttagactttgcttttactacctatttttcagacaatggagtcaatgaattctgggagactcttcacccagtcatacacgatagattttgagatcatcataaaaggattaaagtactgtgcagcctgggctgacaagatccatggtcaaacaataccaagtggtaagtatgtctgggaaaatacaagcatgattgtagaggtgatgccattagtgcagatctccttgataaatgtgtgcatcatctaggtaaataattgttttcttcttcacattgacctaacacagttctgatgctagaagttctgttaagagtcaacattgtggattagtaagaacattctcatagactcaactactaatctgagtgagatgtctcagggtcctaacttttcaaactggccatgaaaattatatattgagctccatttccataatgacatttgtatctcttctataatattatcacctaagactttgaatgtccagaatgaataatctgtgccaatctgtgcccatttaagcccagtacacttagctcagggtatttcaaaaacccaatttacactaacgtgttcacaaagcacccaaacaagatgagacaatgattaccaggtgagttgagaacctttgcatggaaatgttgtgcattacttagtgaggtatacaagtagcagaacagacacgtgacaagtatttcacgtgagaaaagaattagtttgggaaggattggaggtggtttcacatctttaactgcaatgactttaggaatgcaaataatccaattcaagttctgcctgtgatgtgtacttccaatctagctggaagatacagtagaagaggtgtttgccaggaagttagaagatgagagtaagacaacaggggtactaggaatgggggctatttcttcactcttaggaagcatagaggaagccattttaagttccagtagattttgacagagaaagtgctggtggggtagcaggttcctgtggaagtcagaacaaaacgtacaactccacatgaggccatatcacagtaagtgttttctatgataaaacaccatgaccagaatcaacttgtgaaggaaggggactctttcactcgtatttccacactatactccatctctggggaaaataagggcaaaaattcagggggaaacttggaggcagtaactgaaagcagaggccatggacaaatacagattactataggcttaccttttatggcttgctcagccttatttcttattccaggatgacctgccaagtgatgacactgtttacagtggggtaggccatcccacatccaacaataattgagaaaactctgcatagacttgcctacagagcagtctgatgggaacattttctcaattaaaatgtcctcttccaagatatatttaggtttgtgttgctagtgaggtacaagagtcagtcaaatcaagataagaaaagaatcacatttcactttagatattttattcatggaataagagattgtatttatgtttagtaggaaaaaggaaacccctatatctgaacaagtctggaaaaagacttcttactccttggagaagttttactgtttcaaatcatttacctttttgaaagttgatgctactaggacatttgaaatgctgcaaacatttgcatatggctcagcccttactgtgagaggacatcacctcccagtccctttctgtatcactctaaatgagaatgatgcagaaggcagccatctctgaatacagggaatggagttaacagcctatcaggtctttccacatcttgtcacttattttcacataccctggttttcagactgaaatttctgtttgaggactctattgtttatgttatcaaccttataaaaaggatattttgtttttcttttgctacacactgtggggctcttcttgtagcaaccttgagtcactctgccatgcatgttagcacatttgcctttaatggatggtgtgtctgctctgttttccagatggagatattttcacttacacaaaacgtgaacctattggggtgtgtggccaaatcatccctgtaagttctccttcatgactccaatagggaaaagaaagcagtaatccattttatctgaagcccatccccacacaagtgaagcttgtgggatggttatgtatgaagtaaattctcctgtaactttgcttcttggctatgagctagcttatgcagctctatgtattgctgtcatttgagggtatttcagtgttgtcaagtaagccctaagtgtttacttcatgggttgtattgggaattgtgctatgttctggtttcatgagctgtgctttgtaagtatgtgacaaaggcttatcacggctcatttgtgctgtgatatgtcagtggacacagcagtgtccactgcccactgtggacagtaactgaagcaagattgttcaaatcctggagaatgtcttttgattgaaacagaagcaataggctccatgaaaactggaaaagagtgtagttctattgtacctttaggtagcagggttggggactcaaaattcttctgccaaaaataatcatgttctggatgtaaccagatttcctctaaggtcactggccacatacagctgatttgatatattttaaaagactaaattaaaacacagtcaagtgtcctgaagtttttggactaatggtgacccttgtttagtgtgaatgaatataccagtgtatttcatggaactgttcagtacttcaaaggtttaaaaaacactcaaacacacctacatcgctctaccagctaagagtattggataagtttaaacattagtttgccattcactctctggatgtgacacctctttgcctttaataatgccatttgtcctgggataagcctagctcactgatgtggagaacacatccaacatgattaagttcctgggattattgtctagtgtgtgtgcgcatgcacatgcacacacataatctcctggatatgaattttataaattataatattggataaaatacaataagtgccttccagggagaaagaggaaggttatttcatactttaaaaacacaagtaaattacagcatccattaactatatgtgaaaccatgcagtggcatttgtcttgtaaaataagaattcaaaataacaggacttaattagatttggtaccactttcctgttcccttctcctgtatagttagttttgtgctttttatcatttactagtttcttttgtgaacttaagtaaaataaactagacaattaggcacaacttccaaaatattagtcaactttatcagggcagcaagcatcaataacaaatgtggttttgagcaatgcaaacagttcactgttcaattttactttccagtggaatggtcccttgctaatgttcatttggaagataggccctgcccttagctgtgggaacactgtgattgtcaaaccagcagagcaaactcctctcactgctcttcacatggcatctctaataaaagaggtgagtcttcagagtcacaacatgcaggtaaattcagggttctccaccccccctcgtttacctcacaaacctcactcccactactgtaagctccactgttcacacatggctcttgcccactcatggagatgaaaacagtagggctacagtctgcgacttttgtcagaacaaatgtgtctctatctaaatactggcagaagcttgtaattggttatttacattattcaaatctcatggacatatgttaatgaggaaatacagtattttctcagatggtgaaatattgagctgtatcttcaccactcagcttataactggcctagttgcttctgtaaacatatttgagttttattatctctaaagtgtggtggcttctatgccaatatgcctgctgtgccaacatgtttctagtttagttggtggtaacaataaattctaactttcggcataagtaatttagcacacattcctatatcctatcaatttgaattacttttataaactttgacatgggcaatcattgggatgatgaacagttgtcacagttttgctgtcaacttgacagacctaagaagagggtaccccatatgagaaattatcttcatcagattgacctgtggctatgcctgtagggtattttcttgattattgattgatgtactaaggcctagcctactgtagtgctatccctaggcgggtgggcctggttgtgtaagaaagttagctgagccagtcagagaaaataaggcaatgtgtcacatttagttcctggctccaggttcctaccttggcttccctcaacaatagacataacctataaaccaaatataccccttccttcccaaattccttcccaatgagaggcaagtaatataccaatggtgtcagatttgcccttagaacatgctgtcctaaggtattgccactttcagagatattttcatttggttaagaaattaaaaacagtagtgaataaaggacagatatacttaggtgtgttctcttgataaaagtactcccaaggtgagcataatgaaacagcaccagtctcctacttttatgaatcaaattcttgatctactaactgcttgctttttaacttgcaggctgggtttcctcctggtgtggtgaatgttgtccctggctatgggccaactgcaggggcagccatttcctctcacatggacatcgacaaagtgtccttcacgggatcaacagaggtagtattgtttcctggaggtttcttctctatcaagcagaagcatacgctttgcagctgtctctcagccaacattgtctttaaaaaaagttgctttgatgctttgtatttattctagactacaaatacgtttatcaagcacaagttgatgaattttggatagaagaaaattcctgttactaatgtggaaagactacagtaaacaatttttagtgtaatcattaccacctcttaggagaaatataacctttgagactatcagaagattagtgaagtatatggtaggaaatacaacttaggccacagtgatttgtgtgaatcaatgtaattaccccctctagattaagaaaagaaaatagtggagtctcacctctagagccttatttggggctgtgtctacccagctgtcagaagcctgtgtttgcagggctacaatcagcgacagccgagcagcccaaggtttgtgcctgagagggggagtgtggatgaggaaaggctagctaaatgggttaagaatccaagacagacacaggatagctgtcaggagggccattcaatccatactgaatgctcccttagtttaattctttcgatcttatgtattcaaccaacagcgaggacaaaatggcagaagacttctattatcatgtataaggggcaaagagatttacttcccctaatcctccaggtatttggttgccatccaggctttggggtcaataagacctgatttgagctctctgaacttgtggcaagttagaatggactccttttcatgggtcctgacacccagcgtactctgagagggagacaaattctgatttcttccaaattcctgctggaaaagccttggttttctgtgtgccaggctacaccatgagtagatgacagttgataaacaggaaccagccacaactgtaataagactcagcaaggggagagagagtactagagaaagagttgtaaaacatataattctggggattgaatgagtttctattacaaacaaaagagtatgcagatatcacactgtttcaaacaaactcatgtttgagtcactctgaggttggaatgttattaactcattggcatgtttgaaaagtgatcatgcatagatcttgccagggtacagcctctgctcatgttcaggtcctgaggtggagaaggggcattggcagaaggaaaacttctgaccaccaagtgggttgaattcacgttatcccaaatagctcaggctgtctttatttatacttaagagtttttcttacaagggttacatgaacagctttattaatggcttctatttcttttattttttaatttaaataggaacaaccatattttacatgtcaattccagtttcctctccctctcatcctcccatgttccctctaaaccccccatccaacccccatccactccccagggagggtgaggccttccatggaggaatcttcaaagtctgtcacatcatttgaggcagggcctataccctcccctgtgtgtctaggttgagagagtatccctctatgggtaatgggctcttaaagtccattcgtgcactagggattaatactgttacgctaccagagcctttatagactgcccaggcctcctaactgacacccacattcagagggcctggttcgatcctatgctggtttcccagttgtcaatctggggtccattggcccccccttattcaggtcagctgtttctgtggatttccccagcctggttctctttgttcattgctcctccctctctgaaactggattccagttctgctcagtgtttagctgtgggtgtctgtttctgcttccatcagctactggatgaaggctctaggatggcatataatgatttctatttttgactttaagaaacacatcacaatttaaggaagacattgtgattcttatgaaatctcccattgttcccctttatgcttccccaaatgcagcttcaaacaccctacataaccttattctagacagagttcaccatttttgcaagcttaactaaatatctagccagacagattctgctcttgtagcacttatgtcagctggcagctacttgtggctacaaagttaaaaagtaatagactttggtacaatgctctaaggacaataatattcaaatctaaatgattctttcctttctgcaagatacgcctttctacagttcccttttctacaagagggtcccatgtctcaacctttctgtaaaaggcagaccttgataaagcactcttttcccatctcactataccacacttcttccaccaatataagctcctgtgcatggtaaggatgaatctatccatcccacattttgcattgtacttaacatctgtagattttagaaaaattcttctaatactttcatccccaagatataagttagctaactgacagcagaatttctccagtaaacttggattttttttttaatgtgaaaaaaagataaacaggaatttgttatctagaaaatatgatattctaaatcatcttaaggggaaatggtgctaggaaacatgttgtaatggttggactaggtggcactcacaaggacttcaagcacttgagaggtagaagcagtaggatataaggtttgaggtcagactaagctgcatagagagatactcttagaaaatgaaggaaaaaacaaaacaaaagaaaaagaaaggccagaatgcaggaaggaaggactggaggaagagagagtagggaaggaactgtgaaagaataattggatacaagttaattttagggtttctgtaaaaatttcatttcatgccaccatgtgaagtaggcaaagaaagccaggtgataaaaaaaaaaaaacaaaaacaaaatgcaatggttgcctctaaaaaagaaagtagatcattttagcatagtgtgctctcaatatatacaatgaagagtcaataataattaaaacaggattaaaaagtcaaaaccaaagtgatcatagataaatctctaggcaggaaaagatccacagagaaaataaaataaaacaaatgcaatgcatttttcttcaaggaagcaactagaattaaagaagtgagaagggtgagattccagctcagtgtaggaggaacaaagagatgagagccagtttctttttctgtgcaaagtgaaatgtgtttgagaagagaagagtggtgggagatgtggcctgggagcagtggggaggaagggaggtgattaagaatgaggacagtgtgataaataggttgagaaacaggcagtgactgtgtttttaggagatttacacagacatacatatgtgacaccatttgaggcagactcaggaatatctttatgagcttcaggagaccaggaggaaagagtaatgtccatctcgtcagagcaaggctcaaggagggtctgtgtgaagagttgatcccaagtaaaggaccaaccaggaggcagtgtgagctgtgaaggtatagaaagagaggaagagagctgagatttaggtgatgaagagaatactattttggatggacagagttccctggatatcactagagggattagaagtcagtcaatacatgaggtgtttgggagtatttctgatcaaatacagagaggacattctgatgaaaataaaaaaataacttatctgttcagacacgaagtcagcactcacatttgtccatgaacactttctgatttgcctcgtatttgcagacttgatggtggaggcttttatatttgaaggtgccaggtcttgaatagcatcatttcatgtttcctccaaatgaagttaaatggtgattcaaatgtcctataaatggaaagtgttacaacaacccatctatgagaaaacaaaccaagcctcttcctctgcaatgttggcattcaggttggcaaattaatcacagaagctgcagggaaaagcaatctgaagagggtcaccctggaacttgggggaaagagcccctgcattgtgtttgcagatgctgactgtgagtataagtcccttgctagcatctcaccttcttcctcctgatgcttggtaatgttacacattcacctggattttcacatgtgactttgcttcaaagtaaaaaggaatttactagagtctgtggtgattctggaatgcttttaaattgatcctatagcacacagctgacaaacacagagaagattttgtcctgggttggaatagattgctacttcccagtggcaatctgagatagtataaatggattgcatctagaatatatgatatggttttgataattccatacctttaattgtattgaggacacaagatacttgagacatttggatctaaaagtagcctggttgccagcaagttcctatttttcctctgccttcactcgggatcattcacctggaaagggccagaagaaaattgaacctgttaaatcatttctctctctctctttccattttaagggtagtttatcattttgatgtgaccttattaataatgatccagatcattcttattttattaccaaacagaatcctcatgttacttcctaaacagtagcaatttagttgaaagttgtggtgaagaatccctttaaccagtccttcagtggctcatacttaaaatgaagctgtaaacaaaaggtccatggaattcactgttgtcactattgggacctttactagaaatattacaagttactatttggttagcatgattcctagtttgtcactttgtaaactctcttcattacactttcaataactactgttagctcacagatttacatgcaatttctacaatcataaactgagtgttcctcatttataaaattaacacacacacacacacacacacacacacacacacacacacacacacacacacacacacaccaaaatctaagtctttttgtttagaattctcaatattccaatacaaatctctaggcacattggaccatctaaactatgagtttagtatgatttaggctttagttatattttgggacaatttttcctgaagtaaggaatgggggaggtgaattgttctaatgtagtgaattttagttgtttaagtgtcattttcagaaagataacatttttttctattgagcaaaatattcaataatgttttgaaattattaaaggcagtagattattcagatttatcttgtcagctagttaaagcctgacacctaaaagaaatgcaattgcctgaagaattataaaatagaagtagttataaaattatttgcaatgatacttgatcttctaatcaaatctacgttcttcagaaaggcataacagacatctcttcagagttctcgtgttattatttccatgttgatttgttacttggcttccaagcagtggaatatattgagtctagatctcatcagatgattgatgattgattatttttttctatgatcatattgtatctgaaaaatgtgtgtgtgtgtatgtgtgtattctttagaaaatgttcctttttccctgataatgttccctttttcagtggacaatgctgttgagtttgcacaccaaggagtattctaccaccagggtcagatttgtgtggcagcatcccggctttttgttgaggagtcaatttatgatgagtttgtgaaaaggagtgttgagagagctaagaaatacgttcttggaaatcctctgaacttaggaataaatcaaggtcctcaggtgagtaaacagtaggtgagaattttggatgtcaaaactaatcttttcaggtctaattttggttgagtaagattaacttcctattcatgctcatgggtggctgatattattttgatctggtgatttgaacatcattctgttttgtgttggctattttttttccatcttgaaacattctaggagtcatggtgagaattaagcatggaaagaatgtctggggagatggatcaacacataaaaccatttgccacacaaccccaaagaccagagttctgattgtaacacccacataaaagtagggtgtgtgcaggagtccatctgtaatcccagtgttaaaaagggtgaactggctagttagagagagccttccccagtagaaaagcttgaaaaccattgagcaagacactcggtgctaaccttcggcatccacacacatgtacatccaagtacatgcaccggtatacactttttccacatgcagcttcatgcacctctacatgcctttgcacctacctatactcacatacatgaaagcacacacatctacataccacattcacatagacacaccagaaagaaggaaaatttaaaaatcctatcattttttgcattctttcattggtaaaatcttaactcctacatacaatttttagtctggaagtttgtatgcatatctgtatattctcctttataagcaatcctttatctcagctgccattctataagcagtacagcactccccaactttctgtagggtcctcagtttctctgatgtattgatatatttttgaaggtcctggctagactgatgacatagtgttgcatacttagagaacagtaaggaaaaagagtagccattggtatctgtaatacataatactaaacaaggaccaataatttccttcgcctagaaagaaatcaatagcctcaaaaagtaagtttcagtattttataactcctaagaagaatacattaaaatagacttaaaatcttgaatcatagaagttcagaggacacaatcccaatttctagctgattagcacagggatccagtctttgtgagtgcatagctgattgtggcagtctgtgtaaaaacaggcaggcactctgggaattttttaataaatttttatttaaatttcaaacaaccttattttacatactaatcccagttccctctccctcctgtcctcccatgctccccaatcatctccccatcctacctcaatccattccccagggagggtgagcccttccatgggggaatcatcaaagtttgtcacaacatttggggcaggacctaggccttcccagtgtatctaggctgggagagtatccctccatagggaatgggctcccaaagtccattcatatactagggataaatactggttccactgccagaagccccatagactgcccaggcctcccagccaacacccacattcagggggcctggtttggtcctatgctggttccccagctgtcagactggggtccatgagctcccacttgctcagattagctgtttctgtggacatgttgggaatttgaccaacataagaggaagtaccaggcatctcaatgcttctctctctctaataagaaagagcttatattgcgtggtgatagtacatacctttagtcccagcacttggaaggccaaggcaggcagatttctatgagtttgagaccagcctggtctacaagagtttgttccaggacaggctccaaaaagctacacagaaaaatcctgtctagaaaaaatcaaaaagaaaagaaaaaaaaaagataaagagcttttgggaagagatatcaagttaattgactagtatctcatctgatcgtggttgagtcaccaagtctttttaaacagagtttgggagcacatactgtatcgcaatcagataggaatggagacaacaaaaaccataaatatttgtataggaaaaataatttccacaattttgggggttctttttatgattaccttctttttatttttacaattaacttattgtatttgagtttttcagcatttgtaataggcgtgttacttatttgatactacatattagagtttatataggaataattcatttatgaagatttttgttttttacttcattcatatacacatacatatgcatatatgtacatatacttggatttcatttgaaaaagtattttcatttgaaaaagaaatttgacctttcctttactcaatttccttgccagtcatgagagcacagaattatcagtctcaaggattcaccacacaatgtaatgagacaaacaatgtggtatatttacacatctaacaccatgctgattttggtgtatattcataaatgtctactaaataaaaaaactaaatgcctttttgcatggtaatagtcaaccttctcctcttagaaagaattagtttttttctttaatttgaacattttataatttgatgtgaataggtttcagttattccctcttcccatctccattgcctttcttctccacctcaagttaatgacatcttctttaattattgctacatacatatctacatattatgcataaacatatcttgtcaagagaatttggtgttgtttactatctgggactgggtaacctgtcaggggtttctctctgacaaaattgatttcctgtgtcatcagctattaatttcctatagttcttcctctggtgtagagtattgtgtgatttttctccatccatatctgaagcataaatctaattaatcttatcaggaaaaaccaggagtcagatattagtgtaaaaatctgaaagaccagagaagcagcagagcagccacagtaatttcctacctttttttttcctctgacaaaaagagccaagatcctgtctccaccccaccttatcacttcatgtctcctctctgtacaattctttagagctctatcattaattagtggctagctctgctgtctgactccaagcaagctttgtttgtcagaacacaaacaaaacattgcacaacacatgtcatcttgtcaattgctttcatcatggtctgggtcttgtttaggtgaacatattgttgggatttctagaagacactctctcacagcagacatgctggttctcctataaactcataaattttctggctcccattttgcaatgtttctgagacatggtgaaggggctgtattgtagacttctcaattgaattaatatattttaacatccattctcaatggtcttgttggactatggttgtcaaatatggtctttccacaaataatgctgtgtttcttcaaattatctgattatcaacacatcaactctaagaaataagagaattgtatattcaaaaattgaagtatatattttgagaccattataacaacatcatgacccatcaaattttctagactggtccaggaagtaataaaggcctctggtacacacaaacattattgagtggggtcatagattgatgaagacaagatcatcactagtcaatctgaaacgtactgaataaaccatactgaaatttgccattagtcatatgcctcaatattgtatcctttggtcttttctgtggatttaactcacccactcatttggtacctcaatcatggggtccacgaagcacattttaactataatatgatgcccaagttgctgactgcaggagccattgtcagtaccatagcatttgaatataaagttctattcagtttgaatccattgctcttataaagttcccagcaaacaaacaccttcagactcgtcctttagaaaatattcaaggactggatggtcactgactgtgttctctggtaaaagatagggaaactctttactttgggaaataaacttgaaacaagaactgatagtgagttttgaggatttggtctagttcattttcagaacaagggagaaagacagagatattcttgggaccagccatccaggcagtctccagtcatccagacactggagaagcaggaaaataggatatataaaatgaaagaaggtaagaaactctgaaggaaaatgtagatgacgagaaacaggttaatataagttaacagaactaggggaaaaagcttgtactaagactgagcattcatagctaataataagtctccatgtcatgatttgggggatggaggtccaagaaagcaagttacaatcctataatagcctaaaaaagaagagattttctttgggggaatatccctttgagtgatgtgcatggaagattttatagcaagatggcaccatatacaatgccaaagtttctaaaattataactgattgtaactagcatttatacaacctgcatgttgaaattgagataagtgcagttgaaaagcatgccatggaatctcttctgatccaaacaagattgaggagattgggggagtccaagaatatgaataatgacattttttaagtcatgacaagggacactttcaatttaaatactcttaagagctctctcctaaaaattcatgagaaagaaacacactgaagaatgagatgagtatctgtcacctattttgaaacattagatttagtatgaatatcctggaattttgaagccctcatttacaatatgttatctttactgtgctcttttttgtgatttctttcaactagattgacaaggaacaacatgataaaatacttcaactgattgagagtgggaagaaagaaggagccaaactggagttaggtggtggacgctggggaaacaagggctactttgtccagcccacagtgttctccaatgttactgatgacatgcgcattgctaaggaggaggtaatgtttcatgtggttctgtttcttgccttgcattgttcttccgtgtgtaacccgtgtgcccccctaaaaccctcagctccttgagtagcattcccctaaattgtttgatgataaagtctaaagcaatttgccatcaagactgatcagtgaggaatccaatgggctacaaacagtttctatcaaacacagcacaaagtccacatcaacttctataggtgcttcattcgcagacttaaaggaatgggaaatgactctgttatttgtaaaaacaagaataaatgtgtacatattgtattacatatgttaggcattgaacaacatgcaatgaatgatctcagttattttttaaaaagcgtaaaaagtcaacctcacagagacagagtggagcagctatgtaagggaagtaaggatgaatcctggggagtgcaatctaagtagtgtcaataaagtggtacccagatattcaatgtataattacgagagactagtttgtgattaaaatggtagcaaatatacatcacatgtctgagggctttttcctatatgcagagatatgagcacttgccttggacaatgaaagtgtcatgtactacaagaagatacagtaacccaaaggcactgaatcataatttaaacattcaatatatctatatacatgtccctgatatggcagagtattcgagaggttgttttctttacccccataatgtagacaaagaaagagaaaaggagactattagctttgtcaggagaggaaatgaatataaagaacagaaatataaatcaaatgtatttggatcatccaccatacttaggttgtctgcatcaatttactcctcaactgcatttgaattgctacacttatcggccaattcttctttgatcagagctattgttcttacaaattttggttaacatgtatacaaatgacaagaaagtagaaaataatcttcattcaggaaagcatttattgtgctcctgtaatatactcactaatatcttgtttgctgcttcagagtaggagcctgaagcccatactgtgttggctaagttgttgctactctgagcaaacccaccatagtcctgctccacctgcattccaattacagtgtgaacactgtaaagattccccattatgagatcatggcagaaattagaaccctagggtctgcccccaacattcagggagtggccactaatgcctcatgacacgcaaattaacttggaaccagaaaaccatttgaggcttgaaagtttttgccaacccatgttcccatttcccaggaaattgtactagcacccagaaaagccctttatttcattttgacaaataccttaccaaaatatagtagtttcatatctatgtgaaaatccagctgcttcttattatctgagggggggcggtggtgagacacagactggattttagtaactagactccagtagaaatgaaaggctggctcacactgggttagaaaagttgtgattcttgttccctatcctgtgactctagccactacagagactacaggtttctgttcctataggttctggagttaggcttccagtaataagtcttcttttattttttcactttttggtaattttgtagattattaggtgactagtaaaatctgaataaaaattttgtgctgttttagcttgttttttattattatataaatatccagatacagtaaaatggatgatatttgaatcaatgatacagtggtatttaaagcataaacattgttctcaatcattgtctattttttactatcagagcaaagcactgctttttcggtcatgctgccttgtgcattacctagaatagtgaagaaaactaggcttaaggtttaagatgtttccaaggaaatcatgtacttagtgatttgatgttcagttcttacattttgagcagctctgtcacagcatgtaaggctagatactgctatggggattggtgtctgctccacagagaaaatcacacatgatcagaatatgtttccctgttcactggccattgccacctgttttgatccttacacgtagatctgaagggaagggacagcaccttagcccatgtagaatgtagggaagcatatgtagtgcatttaaagcatatgaaatgttatcctgttttttgtgccattcttgtgtagatatttggaccagtgcagcagatcatgaagtttaaatctatagatgatgtcatcaagagagcaaacaatactagctatggcctagcagcaggagtcttcacaaaagacctggataaggccatcactttgtcttctgctctgcaggctgggatagtatggtaagtgcatctgaagtaaggtgtgcccttctgcatcagccacacgggcagactgagttgagccccttcagacttgatattcatagaaattatctgacctggtagaaaagtagtttctgtaaacaaaaaatcaaaacaaattaccttcttccagttttcccagttactaatgtagaatagtgaccattttatggctgtttgatttatatgtattgttagataatttcagggcatttggcactctgatataaacaaggatgaaagaaaaattctgttattaccaactatatattagagaatgcatattggtaccttatctacactagatgtattactgttactatcatttgccatacttgaaatcaaacctatggtagagcacatgctctacttgtgagctctatcccagtctgctttactctttataatccaagacaggaactccatttctcaatctggcctcaaactcactcagtggcccacactaaccttggacttctcatcctcttgcaacatgttcctgagagggtgggatcactagtctacatctgcagacatggtgctatttaattattttttaaaattaatttatgtttatgggtattttgaaagcatgtatgtctgtgttccatgtgagtgcctggtgcatgcagaagccaggaaagggtatggaatctgctggaattggagttataggcagttgtaagccacaatcatagttgtaccatttatttctaggtaatatataggtgctttctgcattctaaagtttagtgctgcttttaatctcagttatcatattagattgaaacaaaggagttcttaaagagatttctgaatttttaaattcttgcttagaaattagagttaagtattatctatattagccacctcttctttattttagggtgaactgctatttggctttaagtgtccagtgcccctttggaggattcaagatgtctggaaatgggagagaaatgtaagttaaactttatattacaataaatacatattttgtgataaggataggcactcccaggaaactgttctgtttttactacttggggggggggtaaattccatctattttagtaccaattagttttttaaatgttggaagtactccctaagcacagaaaagtaataacagatggaatatactttatttagctcctactacccagacatggccattctaagcaccctgcctcttaccttggtaactaaattactgcctgtttttaggattgcctatggtatatgtgaatagaagctagttgggaaacattctcagaaagcaggttaatggtaaacttataatattgagatgcatgtaaataagtattgaaacatcttaaatatttgaatatacctcttaaataaattatagttgtcttatctaaaactgatatgtttctggtgaaatctacctaataactatgttgtatctattaaataaggcacttgtttcaaaatatccccagagaattactgactccttccaagagttatgagttattttcaaaagcagaattaacaaatttgggaacggttcccaaagaaccccaaatagagaactcagatgaatttgtagtttcttgattatattttcaagtctgtttagcaaaggtttccctgtactttcattaaggctcatttcttggcaatgggatgaagcagacatagcttagtctcatactgttttattcattgtgtggactgccatgagaatcaagactgccatgtgcagccttactagagcccctcaatatttgctcaatcagaatcaacatttgatgaaggtcccagggatttgtatacagaagatttagaagtcagagatagaaatgtttagattttttcttagttaaggaaaaatgtaaggggatagatgctcttgtggtctgtgttaaaataatatgtgtatggtggtttctgaggaagatgccttatgtcagccttgatgtgacaatacatttagaactctcctgagagtgtccagtgctttagtaaccctaaatacaatgggaagcaacttggtcaaatttatgagctaatttgtctgtctctttgatatgaactacttattaaaacaatacatttgttggacttcagacagctggatgaagccctttaattatgatgaaaaacatgcttttgaggttttcaagggataatttcagaagtttaaattatccacaaaacaatcaacgtaaggggattattgatggctgtctgtgaagaagaagacatcatgtatgtctacatgcacaactgattcaggagcagggttggtagagaatcagcaaatccagctcgttggaaaacctgtgtgtgcataggtttgatgatccttggaatagttctgtatacatgtaatgtgatcttatccaaacaatgcagaatacaactgagtgtagtctttctaaattaagtcatccaccaggtggaaagatatcatgatttccaaaattggcctcaggtagaaccctaaaagttactgtggtatctacagatggactcagttcagcttttggtcacttggggttgatttgaaaaaattcaagtgtataataggactttgagtaacagagaaaatcaccatctgttaaaatatgaaaagtctggatcaggtcaatcttaagtttctttctgccttaaaaaaatacacaagcaatcaaaaaacaaaacaaaaagaaacaaaagaagaaacaaaaatcccacctacaaacattaggtgtttgtttggccccatagtcaaaagatcctgttaaaactacagcttcagaagaaccgagcatcctgactgaaaatagaccttggtcattttctaacctctcaccactcctgtgacagtgcagatgatgaatgcaggctctagtgcagccagtggtttattctgttgcactccagtcactgtacagtacaatgggaactacacttccctatttattggtccaataaaatactaccagtttgaattatgtagcagttggtcttatgtacaaataaagtagtgtaaataatagatgccttttctggaaatgagcaaagtacacaattatttaaaataaaagacattttagaatattgctttccactggagagtttatatttggtcataaagcttatgataagctagcaactatatgaactatactgtgttcaataaatattttacattgtccctactcagataagcaagaaaaaacttgcacaaaattatgaggattatatttgacttacactgcagtgcataaccatgcttatgagcaatttttcttccctctctaggggtgaaagtggtatttatgaatacactgaactcaagacagtcgcaatgaaaatatctcagaagaactcctaaataagtcagcagagtgaagagaaacacttcagcaatgactacacatctcctatagtcaccagtatagtagcgttttcctttaactcttccttctgttgatttcttatacataattgattcatcagtattaatgtcacacatagaaaacatgtagcttaatctgaaagaatcattggccttctaatatgtgaccccaattcgtgccctagactgaaaggatagatttaggtgcaagctctctgtgactctgtcatggtcattgctttccattgtagaatgtttggaatatttacttggtaaggaagaccagttgtgatttaagctctgtccctcagtgacttcttgaattattaaatctgcacaatggctacagagtaagttgttctgttccctgtgtttgaatgagtaaagggaccctgatagcactatgaatagtcaacaatattggcattgttagatatcacaggtttgagtggaaaggtaaagaaaaaagaggtaaacaatcaaggaaagacttgtagttagtattagtttgtttgatggaaagaaacatataggagcggaaataatagaggccaaggaaaaagagacggtgaatatgttggcatcttgggtaacaatagactaaaaagaaggggtaagatatgtacttaagaaccataaacaaggttcatttctgtgtatcatgagttctaatgggtcttaataataaaagtccggagtcagatacaggggaaaattctgcaagatcagagagaagaaggagcaagccaaaaccacctttacctcactaatttggcagtggaaaagggagcaagttcctgtttcctcctgcctatattcctttcttcacccagccacttcgcttcctgtctgtctgtacagacctccaggcctctatggctagctagtgccaagctccactctctgatcttcagtcacactgtatttgtacaagtaaggtatcaccatatttctgggctttggaaggtgtaatagtaagagcaaagggtattgggtaagagaaggaaagaaaaaaggcagtaatagagaaatagcacaaatcagagaacagtgtgaaatggagggaacactgtaagcttgctgcaactggtgtagtgggggacaacgagctgagtgaaaatataagaagatgaaataactggctttgatattgttcctgtgtccttggcagatctgctgtgttatctccagtcccagtacaagacagaccgggtgctggtttctgcaagtccttcctgttcttctcttgccaactccaggctcctcctccacatgagttttctggcagagttacttcctctgccctgtgagccagggcagcttagtcaatgtttgcaaagtcatactttaagtgacactgtcttgccagcagcaaggggtggctgtgtggtgcctaaagcaagggttagaactcatgcttaatttccacagtttcatgatccattgttaggatggtggtacctagtcactgcagagcccttctgtgaaatccccacagtcacaaccttgcagatttcatggtgtcagtctttctgattagcttgccagagtctgtcagatttggcaatgtatcagttgaagtcacagctattaggtcaatagaatgggacttactgggacttgctgaaatgggttctggggactggagaagcagctgatggagtgatagcatattcctattctctcaatttctctcactataatcagccacttcttccagtgtggcatctaggccaaccttatcaagaaatgacaaattaaacgttttaattttgttttatttagcatgcaattttctttaatgtgtgtgtctgtgtatcagtgtgtgtgtaaatgcaggtgctacaggacaaacatggaggtcagaaaacaccttgggaaaattgattctctcttcctaccacgtggaacctatcgatccaactcagttcttcaggccacctagtgggccacaatatgaaattttaaaacgtatgtctgagttatagtgataaaataccaatcgctaaaaagcagagttaaaatgagtaaataaaagtgttattgatcatcctcagtccagcaaataaacattgtatctgtcagaataaaatttgaagtaagtagcatgcatctgagacagatggtatcaacacttgataagcattgaattgctgtaaagttctggtcataagtgttacaccattatagcacttcctaggtggtttaatttactggaaagcaattacacgatgcttagttaaaaaattcagggagggaaaacataataggagccagacatctacaaccttgggtgcagcagtgtgtaaagggttatatatttgtgggaaatgagaattaattattgcaggaaatctgactgtataggaagctcaagagcaaattaatttttagagcacaaagagaaagagaacaccccatccccatatggttcatggaatttatctggaggcattctatacactgttctcttggagttcaaagatacacagtgaaaacattctagggcttggaaagttccataaccttcttggttttagttcatgatgaaatttgctttgtgcctcatttaacaccagtgcacatttaggaagccatgttggaaggtgctgttctttcagtgacagctctgatgattcagggagtgctctgaaaatcaggggctcctctgagttgatgtcccctatgtggcactcacagcccacattcccattaccccttgcaaggaggaccttctcattctggctggagctcccatgtggaaaacaagctgggctcaagtaaaaaggagagagaatatttgagcactggtgtatttattctaaaacattcttacttcaatgacttaaaatttatgattaggaatcgttagatgagcaatttacaaactcagatgttgtaataaaatagcttaacatttctaaatagtagacactgtgtggcagtgatactgtaacattctaacagatgccctaatcagaaatagcagttgtaagaatgaatgaagtaagtggctttggaagtcactgcaactccaacttcaagttttttaagctttcctgaatttagaagatttgcaatttagctgccttttaagatttggaatgtaattaccaccattttaaaagttggagaaatggcggtctgtggaaaacctgaaagataatttgctactgagaattaaaaatattcatatataaagggagtttgcattttcttatacctaaagagtgcctatattttttgccagatgtgtttgaaccatgtataaatatgtcagccagcaggcacgtgaccattgtggaaatgcaccccataagaccatttctcatatatcacaaagaaggctgagcagagaataagacaaaagccagaagcgctttgattatttgaaaattaaatcttccttctataaataagacattacaggattaaacaaaacccttttgctttacattgtctgatcctgagtctctggacagtattttgtatttcattaatcgcatgaaagccccatcaacaataatgattaaaactttggaatgttatggaatttatcgtcggtctatgtgtagagaactttttgagagatttagttttgcaattataagtgtgattttattgtccacaaagcatacagaacaaaataattttcattttcacaaatggcaagctcagtgatagaaattggaattttccattcaagcaaaggcagtttcatacctcagacacagatcatcaaatgtcaaatgtctagtctagtgagttttttttttttttggtcgtcttttattttccctgttacattttaaagtcttgataatttagttaaataaaataaaatttaattaaatttacttaatggtcaatgaagagttgaaatattgtggagggaatatggagacatgtagaggacattctaggtgtgaattccttgtcctatgtcaacttggtggtaggtcgcattcagaaatgacttgcttgacataaacgtgaaagatcctgtatgttcaatgcttcaatgtattagaaaagatgagaaatacatacaaaattgcataatcagaataaagtagaacacacagtgtctatgactgatactaagaaattctgtattctttttcattggaaaaagtagtttcatcctaattctatggaagggcaaccatagctcccttgtatactgaatataaaatccaagcatgtgaaggaatcaggctctagcttggaaatgagaaataaaattgggaagctgctttttttgtggtaaatgacttatatttggcatttaatgctaggtgtaaagttcaagaaattttaatgttggtggcattcacctgtaatcccagcactcagaaggcagaggcaggtgtatcttttggagtttgaggccaacctggtctacaaagggagttccagcacattcagagcttttacacagagaaagcgtatctcaaaaaacaatagatgtgtatatatatatatatatatatatatatatatattatatataatgtatattatatatatatatatatatttgaataatatatattatattcaaagccagcttatggtaccttaagcaattagagaaaaaggcactgaaaatagtttggtaatatgttgactttgaactttacatgtatttcttctaaactacacagtacaaacaacataacttttgcctagttttccctgatgtaacaacttgcaaaactctggcagaaattcacaagtgaaacactgaagtctttgcagcccaggagtagaacagctccagtaacatatgggtctctggtgttagcttccaagggtcatgtccatgtgtctcacccttgactctagactgtaccttgagaaaggtaagtttgttcttatttattcatgttccatgaattaggattttgttctaaaatttgcccatgcttttcaagaggtcactccgtaacccagaaagcctttggatttgcaatcctcttgtctcacccatccagttggctgggatgacagccctcacccagggctaaaataggctcagcatatatttcatttttataacatattctgttaagctttcagatggcagagatattattttttcatcttttttctttgtgttgaagtctagtaagagttcttcctcttcaaatatcaatatggcagttctcagaaaaattgggacttgatctaactcaagacccagctagaacactcctgggcaaatatccaaaggatgctccaacgtaccacaaggacacttgctcaactatgttcatagaagccttatttacctgttgtgaataaactgaaaacaacctagatgttcctcaacagaagaatggatagacaaaatgtggtacatttacacaatggaatatcactcagctgttaaaaacaatgacatgaaatttgaaggcaaatggatggaactagaaaaaatcctcctcagtgaggtaacccagaccaagaaagacaaacatggcatgtactcacttataagtggatattggcggtaaagtaaaagttagtcatgctatagcccacaggcccagagagactaagtaacaaggagggcttaagtggggacacaaggatctctctgagaagggcaaatagaacagatttcacaggtggattgtgggtggggttgggaacatgagagatcaaatggtgggagcaagaaaataatagaaaaaatgcatttcaagggtgaggtggaaatccatggaatctacaagagtaaccctagaaaatactactagtaatggggaatatggagcctgaactggccgttgtctgtagccaggcatggcctcaagtgtagggattgggacaccaacccagtcacaaaaccttcaatctacagtttgtccttcctgcagagtgttctgggatcagagcctagcagaattgtcatcaaagagaccagagaggcttcatccagtaactgatgggagcagatgcagagtctcacaacaaatattaggcagagctaaggagtcctttggaggatagggaggaagtatcaggggaaacatgaggtgtcagagataccccaagaacatgccccacagaatcaactgaccaggactcatggatgctcacatagatcagggagcctgtagggatcctaggtcctctgcacatatgccacagctgagtagcttggtcttcttgtaggattcctaacagtgggaatgggggctgtctctgactcttttgcaaacttgctggactcttttacttgtagtgggttgccttgcctggccttgatgtgatgatatgtgcctggtcttatagctatagcttgttatactctgtttggttgatgtccctgagaggtctgctctttttctgaggggaagcagaaggggatggatcatggtagaggggaggtgggggaaagacactgggggagagaggaggtaggagaaactaatgtaaaatacaagagaatgtaatatatatattcttctctaatatatatatatatatcatatatatatatatatgagaataaaatagagttctttatgtctaaaagataatgatttgttcaagttcacaaaggaatgggataacagtcaaaggttatggtgaagtccaattatattgtctcaggctgtcatgtcaggaagtgaacaagtgtctagagataagaagacagtagactacaagaaagaaaatggaaggcaatgctaagagacagctggaaggtgacatttcaaggagggtttcatgagaaataatttagctaatgacacactcgaccctgaatgaaggatatttctcttcctttccaaaggatcatctgtttttacatactctatttaccattcatatattcatgctttgaccttacaatgactattttgacatcctaatgcctagttatctttccatttaatatcatgcacactgtagatcaggatgagaaaagacatcataaaattcaaaggtatatattagaaagaacagccagtgccactctgtgtttccttatagtgcctgggtctatcaatctaatccctggtacctttctagctaagagattgagaaagacatcaaagcacatatgcatggtgaaggtgtagaatactacaaggatttctgaatcttcagaaaaatattggaagtaaaagattcattattagagagccacggagtctccctgacacacagttctgaatactctagaggtaacagctacagacagatgatcagtgaacctttagttgagaggcatgtcctatcctgctccatctaaaaaggctgggcagatgaagatgtttagttataacatgcctgtggtgtgactataacttctgaaaaacacagcaaacaaaagcagtcctactttatcactacgatgacctatcaggctgtcaagattcttagacctcagagtgagacatcatcactttttctctcttcttcttcttcttcttcttcttcttcttcttcttcttcttcttcttcttcttcttcttcttcttgtcattttgacccatatgggtcaatgatggaatttaaatgagtgctttggatgggcctttgaaactcccctgggatcttctctgatctacaaggtctttctgaaacaacacaggataagcagctctgacatgatggtgcaaaactgctctcagggaagcactgaatcacatctgccagtcattcttctcaattaagttcccggggcattttgattgtttttcgtggaattgagaagttagagtaaattgaccacaaaatcaaactcctcccattcaaaattcacaaagcctgccctgtaggctttaagtttatgaatggaaagacattccatggaccttcaggccaaagctatcagtccatagctattacaggttaagtgtgatgggtgtggttatttagtgagttcaaggagaagtggatgactagcatgcaggattactttctgtaagaattccagattaagacatttcctgctgtaacattacctgtcacttttctgcacgtaattattttagctactggctggaagtgagctgagagtattgatgcacatgtgcttgttagttgccttgttctgtcaactctgtacttgtttgaagagtcagtgtttctccagtcttcctctaggagtcctcctgcattatgctcagggtccaactgtactaaatggaagaagttctgctctgaccgtgcatgatagctactacttactcttttcattcacagagactaatggtcctttaggcgggtaaaattttatataatattaagatgttaaggagcatacgttgcacagggttccaccttcttcaaggcccccatttgtcatgatcaaatgggggactctgtgacacaaaaacagattaactgaaagattcaaatgttcttctttttcctttctttgctaacccacatcttcaccatataccggttgactgagcatatttttcattctttagttgaaatcttagctggagatggtcttgggtggaaggttaagaagtcttttgtgggtgtgaatgttctcagaggattgatattattgtggtcttgacttgagcactttgagttctcttggtgatacttttctttttgttcttaaggtatttcctgtgttgaggttcttatacactctgtcacatgaacaattcttttatcacaggacttttgtcctattacagctattgaataatccatcattctctttgattgaatcaatctagaataactatggcaatgaccactgttatatgtattttccacatccagcaccttaatgaacaaagctgtgtttcccaacactggaatttaaagagggaaagaagtacagatatggatgagagataaatgacttgcttaatatgtgttagaccccattttcaatccccacttaaaataaattaaatcagactaaaacttaaaatgaagccaaataagtaggttttaatgtagtgcaacaggtgcctttctacgaatatactaaacaaaagaaaaatttatgcacataggaaaaaagacccagttgggggatatagcaagctctaaaagctaatattcttagtctacaagctgatgaaagagtgctctacaaacctgagcaaaattgcccatttgcctctaacctctagaacttagtgaaaacaaattttcacgtttagggcacagcaatctgcaagattttgttataatagcaaagacaatagcatgtggccaatgtcaggcattccttccccttgcttactcagagtcttacagtgagacccttacagggcagcaggccttttacttttagggatcttctcttgatgtcttttcagggtagaagcagatactagaccactgcagaggaaacctattgcaggaaacactaatcaagttttttcagtgattccttccaggactcccttcaaactctcaatgaatacatctcccgaaaaattccttctcatcatcccaacttcataacacccaagctgaccttcttggtgggtgatttacaacacttcattgttgcttctgatactttttgcaaatcctatatatggtttagcatatcttttgtatttcagtggctattgaacctcagatgcccagctgaaagtctttaccagccatacctgagtagacttttccttaacacatgctcagtatgtaagctaacttcagagactgtgttctcatcaattgctttctcattgctaatgtttccaccaaaatgcaatccaccaaattttggtgcaaaaagattttggtgcaaaatcttttccaccaaaaagaatcttgaaatagattctttttcagtgctattattgatggttaggtctcttggtcttttcttatacttggtatgctggtcatattatcaagggtgttggcctaatggctacagtagttagagaaccagacaataatattctgaggagttcagcagtctttgtacatgttgagctttcatggagagcgctgaatagaaactaagtatgatagtttgaatgtaaatggaaccataagctcacgggaagtggcactattagtagctttggctttgttgggtacagtcttgttagatgaagtgcatgactgtgggagctggcattgagatttcctttgctcaggataccacacagtgtctcagaccatttccggctgctgtttgattaagaggtagccagcaccattgtctgtctgcatgccaccatgctccccaccatgatgataatggactgaatctctcaaactgcaattaagcattaattaaatgttttcctttataaaagttgtaatggtcatggtgtctctttacaggaatagaaatcctaagacagaagttgctatcaaggattgtgggcttgctgataggcctgaccatgttttgatttcaagtaatatgaattttggtactttggtttaggaaagcagtggaatgctttaagcactgttaattgtgccatactagtaggagcatggaagacattggtgttgagtatgatttgatggactcctctaagaggtttcagaggagaaaatttttagtatgttgcctagagatcattcttgtgatactttggtgaagaatgttgctgctttttgctcttgtcccaaacatctgcctgaggctaaagtgaagagctttggattaattccattggcagaggaaatttcaagacagcctcatatagactctgtcatgtgatttttagtggtaactctaatgaagatttataatgaaaaaggagaaatctgagcaaggtgcattccaaaatgtaaatcttgagaaaaagaacaccaggaagtggaatggagctatgttctgtgttcaaagagataaatggattaagaaattgagtgaaaggagtggtaacctcaggtcaggatcccacaccgtttccaatttgtgaaaaggaattagagaaaaggttagatctacctgaggtggtacacacctttaatccaagcacagaaggcacaggcttgtggatctctgagtttgaggccagcctggtcttcatagcaagttaaaggacagccaacattaatcagggaagaaaactatggaaaacagaaagctgctgaagatgtaattgaaagatccatgaataataagccagcctgatctatagaacaagtaccagaacagacaagcttaggcagtaaaggtaacaatcaaaaacagaaagcttgtgaagatgttattgaatgagggggcagtgttccatctccagcaagcagcagaacttggtagcatcatccatgtggttcaggctttaatgttaaggacaaaagaaaccggttatggaatttgcctccatgcctaaggaaagcagctaaggccaggcatgtgccctgtgtgtcaccaaatggaggcctagtagaaaggcaattgtgtgaggctttattaccttgcagaacccaatatgtcatgggatacctaccaaggagaaccggtaacaggaagtgaaaatagtccaagagaaagaagtgtgttgtagtcaacaaagctgaacagagtccggatctgaagagccttctgatatcagacacagagatgcagagtttggagtttgcccatctggtgtttgatgttgctttagtccagtatttcttcactaacctcccttccctactttttggaatggtaatgtgtatcctgtgccattatatgttggaagtatgcaatctgttttttgatattgattttacagaaggattacagttaagagattgccttgagtctcagaagagattttgaacttttaaacaccattgagactgtgatagattatgggaacgtttgaagttgagctaaatacattttgcattttgatgttgttaaaagcttatgtggaccagggagtgaaatgtggtagtttgaatgtaattggcccccataagctcattgagagtggcattattagtaggtatggctttgttagagtaggtatggccttgttagagtaaatgtgtcactgtggggtttaagatttcctatgctcagcatatcacccagtgtttcaattttctgttgacttctaatatacatgtaccttgcaccatgtctgcctccatgctatcatactccctaccatgatgataatagactcaacctctgaaactgtaagcagctacctaaattaaatgttttcccttataagatttgccatagtaatggtgtcttttctcaacaaaagaaaccacaactaagacactgagcatatacagaaattgaacacctcaaccccccccaaaacctttgaagatatgaaaaaatgaacttcaaacaagttttgacacaatgtatttcattttagaatatagtggaccctatgcacccacaagttctatatggattagaaatgtgttgctgctgaaataattgaggtaatgaagcctaacatgactgtgaatatcaactgatagaccactttttatctatttgtaccttagacagtaagcactaaggtatatttatcacttatctagaattactattaggtatcagaagtaatctagagatgatttacattgaatgggagtacactacatgttacatgcaaatactttgtcagtttagcattttggggttcaggttgtctttggggatctctgtaacaattactgctggagagtgagagacagctttgctttcacatggtgtatggctatctagtttgaacactggagaaggatattcttttcccctcttagcagattggtgataactatggagtgtgcataaaacatttagatggatgggtgcacagtcagatgcctccatccttataaaattataaataataattataaaattatagataataattttaacctattgttaaaattaagcaccatggctctatttttgctcctgtaacattaaatgtaagtagtgaaaaaagaagagccacaatccataagaaacaatgagaaagcttttatttccagcagcattgtgtagggaaggttttcccatggctgaagtctttgtctcagagcaagattctccccacccttttgggagtgcaggaggctcatgatagcccatattttcccacaaagagaacattgagcagacagagccacatgaaagccgtgtttcataggtctgtttaaaccacagctgtgtgtgtataaaaaccgtggtgtctgtagattgtacttgataactcagattcttgtggtttgcttttgttcccccataatctctgaacataatttggaagcaagtcagtaaatattttgtaacacaaaacaatgtcaaaatataaattttaatatgagtaactgaacactcaaaatatgtagtgcatgtgtaatttttttttagaaaagcagaattaaatacattttatatactttgttttttccctgaatattcaacactagtatgtgatacatgagtgtaaaatgatactttcttgtagttattaatactacctcttgctcagaccagactctacatctggaaaatccttcctgttcagtaaaacagacagagggtcccagacttctgatggtggaatttatacttttcctaattatgaatacgcaaaagtaatgtgcatttagcagaaactgcaaggttatttgaagttggacctagtcatagaacaacaatatgcagtacagtatcctcctggggtgctgatggggttcctatccatttataaaaccacacaggtgaacaattagtgctgaaagacccaggctacagtattcaataaattaaatgagatattctacagttacaaaataggctttcttatgaggtagactaggctaatatatgatgttggctgtatcagttatatacttgcaccttataaaattatcatgtttaactcaatcaaaaatcagaaacatgtataatataaagagttacttgctctttaatttccagacttgtaagtttagggcttttttaaaaattcattttcttattttgtgtgcatgtgtgtatacatgagtacatgtgttcatgcatgtgtgagtgcatgcctatatgtgtgtgtgtgtgtgcctgtgtgtgcttgtgaattcaggtatgcatttgagggttaaaggacaactcttaaagagtatgctggttagttttatgtcaatatgacataaactagaatcatttgggaagaaggaacctcaactgagaaaatgtcctcactattttggtgtgtggaacattttcttaattagtgatggctgtgggagaacccagtccattcattgtaggtggtatcatcatggttgggccaggtgattaaagagtatatgaggaattagttgaacaagtcttagacagcaatccagtaagcagcactcctctatgacttctatatcagttgatttccctggaaaatgaactatgagctataaaatgctctttctttcccaagttgatttttgtcatagtgtcttatcagagcaatagaaaccctaagtaaggaagggagttttcctttcttgccatcttataggattttgaagtccaattctagttcttagacctgtaagatcttctacttctaaaccatatggctggccaggactttttattgaatacaatttaaggaaggaaagagatattttgaagcccatgactctccaacagggtagtgacaaactgaaatgggattcaacaaaattattgtaattatgtctcctgcaaagatctgcagcctgctggtctatatgctaattatgactgagtttcatgcaatggtcagttacactcaaaagatattggaataatctgtgcctaaaggtatttgcactttatagggcttataaattggaggattggtgtggatgtaagggaagggaggacgattttaaagctaaatagtatttagaatataatgttctgaatgtgataaaactggctttgattctgttattatactagagataggatgagtgttttagaatgtcactaaggtcacagacggtgaccaaatgtcaaccaacaaatatacatgggtacaaagggcacaagtctaacagaactttggttgattcctgatcccaacaatagccagccatgttcaagttgtctggtttctgtgcccttcatcaaggaccttttcatttttgtctgtgcttccacatgaaaagcaaggtgggctcaactaaaacaagagatacttgtgtgatggtgtatgtagtctacaatgtttttagttcaaggaattgaaagttaaggttaggagtcttttgactatcagtttaaagagtaagattctatactaaaatagtttattatttccaagttgcagataccttgtgacactgatattatgacagtctaatagctgccctagtcatgaatagcagtgtgagaatcagtgaacatcagtggctcctgagacctgaaataattgcagtttcaatgttcttaaactgtggaaacctatagtaattgcaatcttgtttacattgtaaggcttaggaatacttagacttttgtaaaatgaaggagttacatagtataagagtgaaatatgacaaaatacagaaggctgcattttcctaaaacttagcagtacctatatttttacatgatgtgtttaaggtgtgggtccaacaagggggaagagatcaccgttaactgtacccagacatttttatatatcacagagaagactgagcacagaacaagacaatatccagaagcaagtctgaacattcagaaattaaatcttcttatataaataagacattacaggattaaacagaaaatatctgattcatactgtctcatcctatgtctctaaaattatttatattacattatttgtttcaaatacatgccagcaataagttttaaaactttctaaagttggaagatttcttctcagtctatgggtaagcaatgtagagcaagaacttagtttagtagtcataaatatgatctcagtatatacaaatagtcacaagacaaaatagtttccctgtctgggaagctcaaactatttgacaaaattggagaataccattcagacctgaggtatagattcttaaataacttgccccatgaaatatttttctcttcttttcctgtattattcttccaccattacatatttctgggtttatcttgaaattgttaaataaaattgggcagggatctccatttcttggtgtcaacataaaatccatccaacttagggtacaacttacagttatttctttcaaaaattaaaggagtgataaaattatgtacttctcttcatggtgtattaagtttcttttttcctatgcttacatgtggggcacgcatacaatatatgcatgtttacatctatgtaaatacaaatatgctttttctagcaagtgtatactatgtttgctgagaccacacaaattaatatttcatgtcttcctctattattcttagcattatatattgaggcagggtctcttcacttgaatcaacacttcgaagattagcctagtcttgttagccacatgtatctattcactctgtatttaagtaggggctaaggatctcaattactgttcagatgaaagtactccaggggtcaacacttttacctattgaaccatgggtaaaactatggttttaactatgtactttaattgctattgttattgttgaaattgattcacatatattgctgtgcacttgtccatgtttaactacagcctcaaacttgctactgggttgctttcttctaatacactaaattaacaaagctatgtttttttatggtcctcaagtctgttagagtttcactgtctaacctttcaatggagatgtaattgtgttttcctacttttatgataaaagactgtcaagcaaggagagttagagggagtggctaaattccacagaaaggctcagggactagagggaggtgtgaaaactttctgttgtagtaccagagctctggaactatgcaaaataacatcctgatgaagacactaatgaggaaaaatcagttccacagtcgctgttttagttagggtttctattgctatgaagaggcatcattacagtggcaacttttataaaggaaaatatctataggttggtttacagttcagaggttcagtccattattaccatgatgggaaacggcagcatcaggcggacatggtgctggagaagaaacagagagttttacatcttgatatgcaagcaataggaagtggtctgctcactggccatggcttgagcatatatgagatttcaaagctaaactccacagtgacacacttcctccaacaagaccatacctactccaacaaggccactcctatcagtagtgccacttcctctgaggaccattttctttcaaaccaccacattgcactccctggcccccaaagtcttgtaaccatatcataatgcaaaatttttgaagtccaacttcaaaagtccccagagcctcatataacgtctgaaacttatttaaatgtctaaagccaaaaactcttctgatatttgtgccatatcttaactataatctcctataaaaaatcaaaataagaaagcagatcacatacttccagcatataatggcacccgataggcattaccattccaaaacaaagggaacgaagcatactgaggaaatactggaccaaagcaagaccaaaagctagctggggaacttccaacttggcatctccatgtctgatgtcaaaatgttcttcagatctccaactcctttcaactttgttgacttcaacacatttctttctcttgggttggttccactccctgttatcagctttcttcagcaggtatcccatggctctggcatcttcagcatcctagggtctcgatggcaatccaggcttcaacttcacagcttcacacaatggcctctctagggctccattagggaaacccctgatacatgtctggcctcagcagctttcctagtcatggaggcaaattctatagcccctttcatctatccataactccaggatcatgtggttgaagctgccacattgtgctgcttagtggcccctccccacttattcaattgcatcttcaccacctttctgcttttgatggttatcttcactgcctaagcttggctgtcctggaacttgctttgtagaccaggctggcctaaaactcagagatccaccagtctctgcctctgaagttctagaattaaaggtgtacatcaccttatctggcttgaagcttttctttaattccttttcacaagttggaaacttaactggatgggatcttgacctgaggtcatcactccctttattccatttcttaatctgtttatctccttgaacaatggacttagctccataccacctcctggtgctccttttctccttaaattttacattttgtaatttaccctgctcccttttctttttcattataaatctccattagatttaccactaataaccacatgacaagagtatatatgaagctattttgagatttcctctgcaaatgaatttaatccaaaattcttcactttagcctcaaacagactttttgggcaaggataaaaaggagccactttcttcaccaaaatatcacaagaatgatctctatgctacatactattattctcttctgaaacagtttgagacaggctcccacacttaccaccactgtcctccctggtcctactagtaaggcccattaagcaacacttaaatcattcaactgcctttctaatcctctattcgaaggtccacattccttcaaacaaaatcatggtcaggcctatcacagcaataccacactcctggtagtaatctctttcttaacatttccagagacatgaagagacactttgatcatggcaactcttataaaagaaaacatttaatggagtggctgttcagaggctcagtccactatcattatggtgagaaatggcagtatgcaggcagacatggtcctagagaagaagctgagagttttatatcttgatatgcaggcaacaggatgttgtctgttcactggtcatggattgagtatatatgtgacctcaaagcctgcctccacagagaaatacttcctccagcaagaccacatctactctaacaaggttactcctcctaataatgccactcccttttgggcccattttttttcaaaccaccacaatcaccctaacaatttttggaaatgtatagaatacatataggtagataaggtcagaggtcactttgggacttaatgaaacttccgatcatgtctccacatttacccttagattcttactattgaataggaggaaggtgttctatagccatggataaaattcttcaatcactacaaactcaaattcatgactctgtgaaggagctacaataaagtaaaagcaatgctttaaaatatctactttaacacaatgcattagtttcatgagaatacagtgcttacagtgctgattatacagatgttcctaagagttgatattgtaacactctacagagattttacccaagtttaaagttttctttcacctcttttatcgtgttctttacttaaggattttcctggtcctgggaaaatataatgaacattaaaaaatcaaacagaattttaaagcaatttaaagtttgtagacaagataccaagtcagcataaagaatattctacattctttatttactaattttaaatgtttctcctttgatacaaacactcctataatatattatatatatatatatatatatatacatatctatatatatacatatatagatatagatatagattttgtcttttactttatagacatcatgttcttttagtcaaaaacatttcttcattcttcaaaattaggctgccatttcttgagatcataatgggattatctaattcaaaaaatttagtgttggcaacattatactatctaatacacaaccctttacaaactttgtgtcattgtcctgctaaatatcctctatgagactttctcatattaaaaattgatatagtttaattcttacctaccataataacttctttttgtctaactcttcctccatagtggggcttagcacacttcaaaaccttcaggcttttgaccctagttcttgacttccaaaacgaggctaggaaacattgcactgaaattgttgagctactaataactagagctattgatgattttaagggcaaaacattgacaactcatttcattgttacattatgtgttataaatcagactaaatatttatgcatggtgataaaagtgccttcttcattggataattgtgggaaaaagttatgttcctttgagaacatttgtgactgctctatgtgcttatactatttgccctcctctcatatgatttctactctggtttcattctcttgctgtgacaaacaccagcaaaagcaccttaagggatggaaagatgtacttcaatcttaacaggttatagtccatcattgagatatatatctatccatcctaaggccaagtacctgcctagggaatgttaccatccacagagactgcatagctccactgaccaacctgataaagacaattactcaattgaacctttcttttgtttttctgtgattctaggctaggttaagttaacatttaaagctaactaggacaatcatgcagcttatttattggaactctgctttttttaataacaggtcacccgaggaggctctttaaaatcatttagttataaatatattagccacatgtgaatttcattgccttttcaaagtagagttatagtagaaagattctaactttttgaatcaaattgatggcaaactttgattccaaccttcccaagtgccatgggtttggttaataattaaatctccctagaatagtaccaatcagtagatgagagtggctattgataatcaaaagcaacttggagcccaattatctggtttagatagttctgaattaactgaactttgtagtaaggataaagtttttcatgtttgtaagttaaagatagattttttttctgttaaaaggaattaataatacctacttatttggattattacagtaagtgaaatagtgattatttaaatcagtaaactttggtttatttccctaatggttctgatttttgtctttttaatcatttagataaaggtcaagatttactataaataacagagaaggatggagtagaatgtgagcatgaaagttgtcttagagtgtaagtaagaaaaggaagttcaagtaatagtaaaaaacattctgttctgcttaagtggactccattttctccagcagagttcacagtcatcatgagtaatgtttcagcttatggaaacagtgggagtgactggacagcaagcagaagaggatgtattcaaatgtagctagtagcccattctgatgtgagtcatctattgattaattcacaagctcagccccacaacctcaatggacaggatttggggaccaacaggagacagcttcgaatttctgccttttcatgcaattacccctcattcatgggaccccaagtgtcaaagctggaaaactgtttcgtactgtagtaacttcattttacaaagtcgcaaagaaactagacaacgagtgaaaggctaccaaatgatgaggagcagactttgactagacctttgttttttcagctctgaataagactctttgttctgtaggatattgtcacacatcagttatgcctgataacatgttcattacttgtgcatgcattttatatatttgtattttagttttatatctcattcatttttctacaaaaggaaataaccatgtaatattcacttttacattccacttctatgtattttattaggatttagtaattttgttaaggcaagaaacaacttaatttgtagcttctataagcccttcaattttgcaaacttatcttagtcatcttcatagcattcttaataattagttacagagctaaaactttattaagtttatcgaattgtcaatgaggagtcaaaatgccatggagggaatactgagcaccaaggaggaaatgcagggtataaagtacttgtccgagggaggcttggtagtagatgacattaaaagttattcatttaacataaaaatgaaaggtcttgtagcacttcaaactgttttaaaagaaaaaagtgcatataaaactattaaattatgacatagaatacacacagtatgttgtgattgctcataagaaaaatctgcaattatttggatggaccaaaaaaaaaaagaaaaaaaacaaaacagattctgtctgattcattacataggaattgcatggcctggccttggcatcaaatacaactgaagcatctgcaacaggagagagccagctctagcctagaaatgaggaatcaaagtgggatgacaatgttatacatgatagatactatatttgtttgcaactcatgctaggtggaaagttggtgaaaagaacataatgttttcatattcaaaaccaagccatcaaaacctagtgagacaataacgaacgtaaaaatgaatgatacattcactgagttcaaaaatagattttcaggttcttaaatatagaaaggaaaccacatacattttacctattttctcccactgtaatgaaatactaaaccggcagaatttcacaagtgaaacagtaaaattctcacagtccaggaacagaacactccagtaccatatgtgtccctggtgttggcttttaggcaacacacaagtccttgacctcatcctttaagatgtggctggcaaaatgtaattttgtccttttgtattaatgtttcctgaaaaatcattgggccctttcagattacagcaatagcatcccatttatttatttatttatttatttatttatttatttatttaggtttttcaagacagggtttctctgtattgttttgaaggctgtcatggaactcgctctgcagaccagactggcctcaaactctcagagatccgcctgcctctgctcccgagtgctggaattaaaggcatgcatcaccactgtttgttaagggcatgatctcttaggtaagtgtgttatattcttaatggtctcctctgactgccaaatcgactgagagaagtcaagtctagcaggaagaatactcacacttttcttggagcacatttttatgaaggagaacaatagtgcaactgccatctctcttatcatttgtcctaaaaactccaaaggtccctgtgttcttttgctattagaacaatgatctcctgactgtcctagttcattcgaggccaagagacattattgtggagtctcggtaacattctatgatgatgaaggttctttaatgatttccaaaaagaaaaggattttgagtttgttttcccaaacaaatgatgcaatgacaacttttatgtaaaacaagtcttggggaaaaatgtagggaagataggaaaacatctttagagttgacattttcatattgtcaaattatgactaataagaaaaaactgtggaattaaagaattgaaaaataaatcaagatagggggtaggtattgtatgtgcagatgctgaatttggaggaatagcttcacttaattaaaaagtcaggattgttactcattccctgtgtgtcttgcagaaaactcagccaatctattatccaggatttatttttccagctgtcatcccattacttgctcgttttcacacgctggactaagcatacaacaaactgaaacttgaagacatactttaatgttacatgttaatgtatcagatgcctcatagattctaattcttttcctgaatccaataacaaacaaagcataccaggtaaatctatattttaaccttctgatcttttgaaaataatgggtgacatttctgaaaatacccttttttgtaaaattcctgtgtgggatttaccatgaccccaatttttctccttttctcttcctaaactttctaaatctggggccaatgtaaaagtatggacaccagccatcaggaagtggaggctgagggagaacctgagcggctgaatatcatcaactcttggattccccatcacagaggctgtaggcagacaaggacaggcaggctggaaatacacctgcccttgcataaggaggcatcacatctttaaaagaaaacccagcaagagctaatataaaagagttgtctctggtaacaaagacttgtttcacagagccaaccctcttcctctttctcctctttctcctcctcccttttttcttattagggagaagggcgttacttaagataaaagaataacaggttttcttttccttgtctgatcaataaaatgaggattagtagttcacacttcagagggctgtagaaagtaatcaatgtaaggacgtaaatattgcaaacgattaacagagcaggtagctctgcccataagacatgattcatggaagtcagaagttcagttattcattggacatgaaccctcatgtgtgctaggcaagtactccacaacacaactaaatccccaactcactttttgtttttaaactttgttcaagcttttcttatactcactctgtagctcagacacatttcactctcagttcacccaccttaccctccaagaagatggctctaaaagccaggtcaggcatatatttgagttttataacatgtcatattgagttgggcctcctgcctttttctttctttcttccttcctttctttctttctttctttctttctttctttctttctttctttctttctttctttcttcattcattccttcatctctctctctctctctctctctctctctctctctctgtctctctctctttccttttgtctttctcccagctttcattatttgtgtttcatttttgtcacagtgatagaaagtcaacattatcttttcttctgttacatgtttttaaatgtgattcacttttagtgcatagggtttattctgtgtaaaccacacaaggacagggatttctcatcatttgcacttctagcgcctcaagaaatcttgcatttgtgaaagaaagcaagggaagaaggaggaaaagggagaaaggaaaggaggggagaagggggagtaaacaattggagagatggcatgaagaaagagaagcaaaaagaaaataaaagctaagaaggacataattggggaccccttttattgagagctctaaatgtaaaatttcaccctctagaactgaaggcttctgggagtggtggataagcaaatgaagttttgttagtatatctgggtattactattaaaagcctgtaaatagtctttctccgttcctctctctgtatgtctctgtcagttagcaatgactcctaaatcattttttgggggatatttgatcacactgtgaaccccgagtttgcatttttattaattaaataaaatcaactttgggtcaggaagtggagcccccagctagttgacagagactaatcatagagaatcagagggactctggaaaatggagagagagactcacaggaagtagtagggagggactttggggatggcggtcttcttttggtttggtggagctgaaggatgaaatattcttagacactgatgaaggagctggtgagctggctgctcctcaacttctttgagctggcagccactgatgcctgagtctttatcgataaacagaaggatggagacttagttaaaaactacatttagtggcagtggcaggaggtggatagagcgggtcagaaaactcccatgagctgctgcctgagaagtggactgctaaccgctgagccacaattactggttgtaacagcagtccattcaggtgcagccactgtgctgacagaaaaacaaaaatcattgctgaattatgtgtgtggacctacaagcctgtccacaggtgagtctgtttactttccattacatcactgtgtgcttgacaaataccacttctctatgaattgacatcttcattttatgattcactattgggcagggtcagaaggtgagagcaattttcatttatttttctttgttacatgaaaagacagaaaaccttttgggataactcaatacttctaagtctgaccaccaaacagaatgaaggggaatcaaggcctcttgctgccaagggggttgccagagcagggtgccagacctgcacaaagcttaaattcattttactttttcaggggtatgacagaaaatattttacaaatgcttatgtttggcactgattttcttttgatttccttttttcttccctttactattttcttggttttctctcctcttggtgttcttgtgtggtgaatgaatggtactcataagagaaaaaggacaagacaagagatttttatactaatttttatactaatggtagccagtatttattaaattctgcatgggtttctttaatgcttttagcagtatataaggaagttgccagtcccacaattcacagaaggcatggctggggggtgcaggagaatggaaagcagcccttccacactgtctgaagaggcctctgattcacagagaatgagttcccagtctcagtcccaggtggggacacattgacataacagttatagaaaaagtgatgataacaaagaaacacttcagcaaggccattggagggaccaagtctccttgtgatcccaatagtttcatcctgcaagaagacaaagaaacaaccaaccacttgaacgttaaccctttaataatctggcctctgactccacctggtggaaacactaaaaacaaaagaaaatgaagaacttagaagcactatagaagcaatacttggagacaaccatttgccttcaacccctgtcctccccttctgaaaaacagttcaccacctattttaagagtccaaaatctctttgtagccaatttcacaaaatagcttctggttagttcatacctgtgaaaagctctggcaaggaactacacgtactagcaagttgtagaaggaaatatggggaagtgatcattggaatttttggtttcataccactcctagagtaagaatgtgtccaacttctttattcattccttatgatggaatgtcacaatgtctcaggtgtttttacaattaattttctgtagaggccaggttttaaagtagttcatagttggtgcttacacagctaggataacactgtccttattttatgatcatcttttcatcacagttagacattagtttctgcttatagggaatggaaattttaaagagcatcaagcttttgcttggcatttccctttgctagtttgcactcttacttttagatcctcggatagtcttcttaattccatttatagcaaagactatcatttctctgtcaaatggtcttgaaactgttgccaaaagtcaattcattcctgatgtgtggcttatttcttgattcatcattcctaaactgtgttctttatgtctgtcttttatttaacatatcttttcctttggagaatttcatacatgagtactgtaattatatcatttctatttttcaacttcctttcttagttccccatctaacaccactgcagcttcccaagtttataacctcttcttctgtaattattgtcaggcattattatgtacatgtgtccagagctgaccacacaggaatgaataacctatcggagggcttgtccctgtagcaaactgattcttcctcagcaaccactgattgtctatagctcttcatctagtgctggcaccttgtgaaatacgccccatccatattttcatgtctactggtgttgacagtatgcatgtctagtttagccagccacattgttgacattctctgcctctgcctctctctgtctctgcccctaccccctccacctatgccattgtatagcctttactgttctggagctgctacataggacagctggctgggaacccacagaaatttgcccatgtctatcttccaagtgataagattaaaggtgtgagttatgtgccagacttacattcttgaattcctaaaagacattaaaactctcttttagatgactagacatgaggactgagtgcaagaagcaaatgactacccaaaacatttctactgcagatcttttgggaacttaaaatttttcaaaattatttcttttattttttgagattataaatctataattttccctctcccatttctttctccaaaccctcccacatatgcctccttgctcactttcaaattcatggcctctattttcattagttgcaggttatttttacagactagtgtgtcttcaccatatggattcagagaccagcttactaaagggttagacttcagaagttcatgtgggatcatcagtttgccattgtatttgactgctgtatcaaggtgacctcatttctggatatgatttaggacacttttgttgcaaagagagactcattccagatggctcaagaaaaatacttttatttaaatatgtacaagaacatcatggacattttagaatgaaaacaaacaaacaaacacccaaaatgtatccagaacttgccaggaacagaagtggctctatacatgatcactgtcaataacattttgaactcatttattacatccattatatacactgtggcactggaggtggacatataggggaagacagacattatacaaataaaatcacacaaaactcttcatgctataaagaaataaataaatttttaaaaaagaatgcaggacataggaacctaactttaattaagatattagtggataaaatttgtgagtgacatttaagtgtagacctaacaacatgtataggagttggtgagattcagaactggacagatttagtgatttagaagtggtttagaagaaataattgatctgtttcatattcagattatattactaggacgattttttaataacttaaaaatatgagataaatatatacttagacatttagacttgtatgcatgtacatatttttatgtgcacacatttgtgactgtaagcatgcatgtgtgcgtgcatgtatgcatgtgtgtgtttgtgtgtgtgtttgaggtaaatggaggaatccttagctttgctgcatcaatctacatatgatcttagccaaaagactgagaagcaatgccgttgaaacctgtagaatatagttcagttaaattgagatttggccatcatctttgctttatgtagtactaggaagtagatgtaacagatttgttgtcaagccaatgttttctacactaattcctaatgtcatttgcaagtacatgaagggaacttacttgccaatgttttatactaattcctgatgctatttgcaagtatatgaaaggaacttacttgccttgcatttcattagctgatttgtcttttcattacattaactagcagatcaggctctttttctcccccaatcaagtggcacaaagacatacttaagtcaggcatgtaaacagtattctacttattataaactttaaaatccaatcttggaaactatagcacagccccaaggagcaccagtcataaccatgcatgctgatccatatttgactctcagagatctgccattcagtcctgattctctctgggccttcaaatgccacatgctaattatgaattagtgtgtcagccactctgacactgtatcacagaccctccacagtgaagcccattgatttaatggcctctcagtggtggttctggtacctctgttgatcgtcaagctctaccagtggggctggtgtataaacagaccacagaaatgaaagactgcatatacgagggtcaccagaagcaggacttagtggtctactgcagtgtggcatgaagagaaaacaagggctgtgtcatcccaatgatggactatttatgctcttccctgttttaaaggaagtattctacttgaggtcttcttaatcagttgtagaactttgaacatgaaagtcaacagtcttctcatccttagatttcttcattcttctcttactaaaaaggtagagaacatctacaccttatgttccccatctcctctccctgtcactcctttctctgcatgtgtcatatgaaaacattttaatagaaataattggctatatttgatcctagctaaatccttttcttactgttagagatttatttgtggccctgtatagaaaacatcttggttaccagagataagatgaatcaactttcaagacttatctcagccttcagaattagtagatatttcttctggacacctaggcaaggctcacaaagtaaatcattcaaaataagctgcagcaatgaggccctgaagattaactacagtatttacgagtggatataactaggtataaaacataaattttccttctcagttgattgtcctagatgcagctgggggatatgtagagaaaatgaacaagcgcagaaacatgtaggagcactcttcacatctcagggcctgattgactggacaggtagaatttaagcattgcttctcccagtatgtatctgtgtgttttgtcagttcagctcttttttctcaattccctcacctataaaattggaatcattccattttgtgcagctctggagattactgagattggaacaagatgagttttctaaagcaattggtctgtaaatattttttattaaaaatcacatcctattattcatagcctgtttgcttgcttgcttctctttgctatgatatgcctctaggcattgtttctcagctgtgggtgaccttgctcctacctctggaccacactcatcagttccttgagacagtttggttgtcatagtagctgtcgagtgttatgaacatgcagagactagaaataaaaggcattgatgagcaccttccatggccagcatttacttcaacaagtacttacataacctgaaatgtcaacaatacaagttagtaggtttctttgctactgagcacatgtggtgaaaggatgtgaccttgtttcgtgttctagttctctccttatccatcttcgcatcattctggagtgaaagctctcagtgaggggtgagctcacagacatcactactatggtcatacctggagtgttagtccaaggataaagaaagtgtttgtaaatgatgttctaaaacattctttcatgaatttgccagcaaagggctaaactagtccgggaaacatatgcctgggggtgaccactctgaactgaggcccagcacagttgtgctaagggaacacatactcatggcacaaaaggcagagcatggcctttgaactgagaaggacttcagcttgaattctgccttgatttttgccaccaagcctctgtcatttggaaattataaaaggcttttcatagctcatcaaagtgactggtttttaccacttccaacattcaggatacctgttacaatgtgcagcttcccatgttgctgaatattcagctagtgtcttctatgaacaatggaactagtagtgtccttgcacatactggaaatactatgtactgagcaagatttaataaatagctactattattattgcaattttgaaatttcagtgggagatgtcaagagagtagttctctgtcttattctattctcttatcttgttcattagaaaacaaaagcacaatgaaaaaagaaaagcaaaagaaaaaaaatcaggagtcaaagaaagtatttaaactattcccaaagccagagataacattgggttttgtggtatccaaggtgtaggtgctttcactccagcatgtggtagccaaggcgtgggtgctctcactctggcagcctctctgacaggaggaggttctaatttccttcatgtgggtttctggaccagacttgaaagtattagatgataccagaaagatatgtacttttgtacatgacaaggaaaatgaaatgaaaaagattattatcatttcttgccctttcctctgtggtaactcatagacaaggttgcccacacgttaagaaaggatatttgtcaaatatacaataacgaaggggagagagaataattgagattgggagcttatagttccacatatataatacatgtaatatagaaatctttcttgactgagggtatctttctgtgtgtgtgtgtatgcgtgcgagagaggagggatggatggataggtagatagacagacagacagatagatagagattcattcattagctcaagtacaagacttaagatgaaatctaggttgccttgagttctgtgctcaaacctgagggaaaaacctctgaaaaaaaggatgtttttcttacagcaggagtttagggtttgctatatgtcagagtgagaaattacctttactgagctcacatgaagatgtccctcagactgttttcttttcacatttctttctttttgtcactgtctttctgttcctcttctcactcttctgtcccctcacccttttcctccttctcttccttctttctcctcactccctccttcatagttttgtgtttttcacaaatacagaacttatagagatgctagaaatacaagagattaaaatccctgtcatcctgttccttacacaaagtgaacactatacatcaaaaatgagttacatttaacaacacatttcgttggaaaatacagtgctagctttccatcattataacaaaaggcccaaggaaatcatctttggagtctggagtttttggctcctagttgacaggtggcagttattggctagtgggccctattcctgggtatatgatagttcagaatatcatggtgggagcacagcagggaggaggcttgtttacttcaggaaacaaagaaggagaggaaaggactaggatccaggatcccctttgaaagcatgtctccagtgactgcacaggaatttaatttaaggggcaactataattgcccaagctgcagatgcaacaacaggagccaaaatatggcttttctttaatttgctatagtgttacacattgatgcaagcacattgaacatggaaattaccccaaataaaagcacacaaacatacctaatgtaagaagcatcacagtttagcaatgaggcccaaagtgatgtgaggacatttttctcacggtcacctagctgagtgagaatcacagagttacaaggaaaacaacaacaacaaaaaccaaagtgcctgtaattatacgtcatagaaacaaaccagagagcacttttctcagaacactgaactctgacctgtaaatcaggatttgcattaataagcctagtgcctatgaagaacaaaggtcaaagagataaaggaagttggcatatgagaaatctaggtgaaggtcagggctcaacaataaccacagagaaatggggattggtaaagaggaggtgttattactggtggctgactgagcaaaaatcattgatctacttgtatttagtttttctggtagataagaaataaactaaaacttatatactcagaattaggcaatgaaagtctcctatagtcactttctaatccagtgttccaaagagtatgcttgactttagtaaatgttttagtaaaagttattttctttatacatatatatgtccatgtcattatagttactttattaattaaaggacttattagaatggccttcaggatagagcccgagtagttcaacaatggcttgtttgcatgccagagagactgagaatctggaagttgactagttcatggatctcgatgctccaacagttgcaatatggtggtgaagatctagaatattcctcgagagtccccagtcttcagtgcatgttggaaagccaaagaagcaggagggtaatatcaagaaaaatagcaactacatccccagaattctaagatagggatagggagttcttcctggaatcaaaatgttgagaccagcagggcttatgggaccagaaagcacatatttttgtagtgggttactaagagtgattgtgagtaccattccaacttctattttatggatcactaaactggctcacaactgcactactttgcctgtgagtgagttctttggtcaggggcaataccatgcagagtacttgatggtggataagggattctgttaggtcatagatgataattttggtagtagctttctgtacaaaaaaataaagtaaaaggtaaatatatacctagaacaagtttccattccactaaggacaaagtcttatacagtggaaatgctccagggtagtcaagtgccactaggttgttgactagtcgacccaagaaatagtgacatgctgagagcttagtattggtctctgttgctggcgtatttagcactcaacagcagccatagccagttcagtattagtgagaagatatctaagttgttgagccaacaaataatcatcttgccatcttgtgggtaatgacaaggatgaccagagaaagagactgactactctccagccacaatcagacccactatacttttaagtgtccagttgagaagccatgtctgtcactgtagggtttaccatgcagatggtacaattaccaagctcttcaagagtgctggtgccccctcccaaatccgttccttaagctttggggaagaacatgttttggccttacctttgtgaaagattaaatttttcattaaaaatccactctagcatccccatgtccctgagtctttgaaccccttcatcagcactgagcacagcatgccatactttgattcataagtcatccaattattcaaataaactcttagcacctttattttttctgcaaaagctgaaacattaaactcaggatctctgtttaatagattcacagctaaatttaaactgatttaatttatgatctttgttattatcacagacccttaaaaggcattagcattcatattctccaggcctgtgctctaacgaattagaaaacctaagactttgaggctgtagtgacctcctcatgggtgttataagagcctgctgagacttgattctgttataggactataggcaaagatgagtgggcattgatgatccagcattagaatgtttgacttttcctccagtttcacaactaatgcaggattactttattgacatagaatagaaaggacaacactgcagttaatgtgccactaagagtgaggaaactacctattcagaccacacaattagaaaattaagtgtccttgagattattaggatcctccaacacatctctatcccatgttgtgggcttccattctttttttaaccagtggcaagaattagtcaaagataagaattatacttgtattgtaaattaatcaattatatgatgtggcttggttttggtttctgattacttcagtcctaagactgctgaagagaagattccctctcagaaaacacttagaaactttaagtaatatactctataaagggggtattttctatcattgattacacaaaagagacagggtagttcaaagatggaatacctctctgcttgctagagagcctgagaacacagtagctgcttactctatagaactgaatgcctcaagaatcctaatctggggtgaaaggctagaagattcctgaagagtgtttgttcttcagtctacattgagaaatagaagaagctggaacctgatagcagtgaaggttggcagcagaagcagagcaacaacaacaggaagagatgcactagcaaaaactgaaggcaggcaggtgacactgcttttttctgggaccatttatgtcttgtcattcctttgtcaagtatatccatctctggaagagaatcttttctcacccaatctttctgggaaatactatcacagatctgcccagaggtatgctttttaatttatattcggatctcattgagttgacaatcacaagtattcagacattcagatcacatcaagttgacaattgtaagtaaccatgtcagcagtgatctctttatttctttctgaaacacatttttatgatagactctaagatagctttgagctactcctacagtacaggcagaccttgagcttgatgtcccatgcttcaggcttccaagtactaggaatcctgctatgtgctaccatgtcagaaagagtagtgtcaaatttagagagataatctggttttgatagtacattttatgtgattatggtaagttataaagatgatcagatatcttcaggtcctgaggaagattgtgcaggcaatgcactcttcttgggttggtaaaatcaattttgtctcttctccctcttgtcttcaagagcctaccatagaagatacatcttccagatgacattcctgtaagaagcagtgggttcaatactcatgtaagattttacagcctagaaatcttgaatttacataatggaaagcctctgcaagttggaattacccataatggtagcacatctggtgtatcctgaggaatccagaaatgtaaatcagattctcacaagacaaaacccacaagagtaaaaaagagtatccaagaagaactgagatgtcatccccaggagagtgacctgaatttgaaaccaaatctgccaaagacagtaacttcacataaacaccattaaccacattctctctcctgcaaagggggattaaaatgatagctaatccatgagttagttatcaaagtgttttatatagttcttgacatacaaaattcacttaatgaaatgtttggtaacattttacctttaaaatatgaaataatacagtgtattgttctccatgcatactaacaagcccatttggacaagcctgtgtaagcaatgcttttaccttctaactccaatgggtgaacatcagagctgaacaaactccatcaaaccgaatgtgaacatttatacttaagtaagtgaggatttctataagtgcattaattctcagatctgagttattggcaatctttcatggcataataaactacagacacataataaaataaaattaacattataatatatggcagcaattgcaatattgcaaggtattattggaaaatgaaggctaggccaccacttttttggatttaatcctacagtctatgtgcaagtttcaaagttggaagatttttagactctgggtgtttgctctgctagagatcactcagttctgttcagtcctcctcaatgaaacttcagcattcaaagagtcctgcaccccttggaatattattgcctggtcctctaactgatgcagccactagaccaacactccctaacaaatgtgaccagtatgccacaataagagcctgaaacctaactaccaataacagcaaaactactgcataaaaagctatttcaagatagtcattgtattttggtggaaactttagaaacacacaaacaataagaacactgtctctgaaattagcttatatactgggcatgtgcaaaggaaatgtctactcatatatggctggtgtgctagagtttcagctgaggatctgaggtgtggtagcccacaagtgactcagtttccatctggagtccattctaatttataagtcattagtcaagcttgtttgtttcagtctccttgagagctgtgagaacattctgattaagtccatgggaaagaacatgttttctaacacaagctgttgatgccagccaaaaggcacatagagataggggatgatactgcttgctgctagcagaagacacgtgaggagatagtaaaattgactgatccttcacttaagtaaagaatacgaaggtggttaattggttaggttgtgctctgttctgctctttgcctctagtctgtatataagcaggttctgaaatatacctgatgctgttcgacattgactgagcaggttttgaggtcttatagatcaaggaaagtaactcagtctaattttcagaccttcttatagaagatcttttcccttccttgcattagtaattttcatggtttagtgtattcttataatttcacgtgttgtattggattagggcacactcatgtagtcctgttttattttaattgaacttataagaccttatcccttttattttatttatgttttcaatactgggatttaatgtaaggcctcccatacaccaagcaagtcctctacccctcatctctttttgtagcctcttttctttaaatgtaaatattctgggtacatgatttagctcattaacctattgtgcaaaaaaatacctgtagcagggctcatcagggtagtgattttagaatcattcaatcaaaaaagaagtttggcttgtagttgttttatggctctgttagaaaaatcctgatataataagcaattactcatttgtttgaatgcattgactgataaaagaaaactgccatattttcatttttatttctgagacaaatactctgacaaaaaataaaggatcatttaacttccagttctaagttacagtccatcactgcagcagagtcccagatgaaggaccttaggacacattcacaatcaagagcagaaataaatacacccatgatggctgcttgcttctgctcagctggctttctattttcttaaagcttccagatcccagcctgtaaagtggtgcttccgctttttacccctgaattaacttcattaagaaaaaccccatggacatgtctacaggccaatctaatatagataatccctcgttaaaactctctttctaggtatgtctaaggtatgttaggtgatgcttaacactgagtggcatgtaccctattattggaaatgtctgaagaatacagagcacacaaagctatggcacaatagtaccagctttctgaggattatcataactgcaaactatttcttatcaaggctgtctctacatctgatttcaacccaaagaatgaggaatgtgcatagtcacttgcagggaggtaaaggtacagttaggcaaaaagaaaattaagaagaaatgtcagtcttagttcaagctgtctttaccctatctaagttcccatttgcacttgacaaacagttgttaccttgaagaaaggtgggccattatgtaaaactaaaatgtcacttgacatctaagtattatattaaattttatgaatataaaatatgttttagtctttgtgaatgaaattattagacagtaataattattattattagacagactctcaggtgtcactcattttatatagttttaccctgtggataatacaccaatgtttaagtcccttacagaaattggcatttcattgccatataatgtgaacacatcctctgccacacctgaaattatctctctattacttataatatatagtacaatatgaatgtaatatagattgtacaatctcgccactccctaagtaacaacaaccaatctacttaacccctaagagcctttatactgtacaatgatagctttggactaaatatatatgacctgtcttcccattcacaagcttaaaccttcatagatgtcttctttgtcaatttttggtgtgagggattagacttcatggtcagtttattataacttctcacttaattctgtgacaaacaacctgccacagtccaaatgtcctgggaatttacctgaaatgagtgacttataaatgagatctcagggcatccctggtagtttctgagaactgttacgtcacagctgtttgcatcgtcttgcttctaaaagactaatacattagagcataatatattgggtgtttcaaagaccactcatttacatttcatcaacagtctgtgggaaaaatcacacacatagctttctgttccctatcaaatatgactcaaaatgactacggtaaaagaaaaagtgatagcatctcactgcagggaatgacctgctatccctaaccagccttccccagctacctattgccaactctcatgctaatagcacctcccagtgacaaagaagtactgccttttattcttttttctttcccttttttttgtttgctcttacaaaagaaaacatttaattggggctgccttactgtttcagaggtttagtccattatcaacatggcaggaagcttagtggcacacaggcagatatggtgcaggaagaactgagagttctacatcaggatctccaagcagcaggaagaagagagccactgggtctgggttgagcatttgaagactcaaatcccacccctaatgacatacttcctccaacatgccacgcctactccaacaaggccacaccttcttttttatttttttttatttttacaaaattataatttcacatgtcaatcccttctccctctctcccctcctccccaattccccaccagtcccttctgccctctcccctccgctccccatagagggtagggccctccatggggctccccaaattccacaacatcatcctgggccgggcctaggccctcccccatgtgtccaggctgagagagcatcccttcatgtgggatgggctctcaaagtccctttttacaccagggaaaaatactgatccactaccagaggccccatagtgtgccgaggcctcctcgttaacatccactttcagggggctggatcagtcccgtgatggcctcccagacagcacactggggccatgtgctcccccttgttcaggccagctgtttctgtgggactcatcagccttgtctggacccctttgatcttcatttctccctctttgcaactgggttccagagttcagttcagtgtatagctgtgagtgtctgcctctgcttccatcagccactggataagggctctaggatggcatataaagtagtcatcagtctcattataggggaaaggcatttatttatttttatttttgctgttgtttgaaacataacactcatttcccaggtgacttataagtaaacattgttttctgtctccagtcctttctgctaggggtaggatggggcaagcttctcagctaaaggttccttgttctaccaggttgtaactcttacctccaggctatttagaattgtaagtcttgatggaagaaacacttttggcttaataataattattgctttacttccaatatttgtttatgtgactcataaatccatgttgtgttctattccctcactgtgaatgtgtgcttttgatgtctttgtccatccatttcattcaaaagtacctgaggttaggcttatgcacaaagggagaacacagaggcatagggcattcactccatctcatccctttcatgcctgtgctccacatggtgatcagtattaaacagggaagagaatcaggcactaggaggtcaaatcatgaatgtacaaatagtaagtagagtacatggaagttgagcattcctttggaaatgaggggaatacccttcatactagcctggatgcagcattagctgctactttccgatgaacccctattttaaaaactcacctaccatcagtctctaagcaatgctatattctttcccacatgctctctttttcctgttactggacattgaactgttcttttgtagacatggccacatacactaacttttctgttacactaggaagtatgaaaatactgtctatcagcctaaggtgatacaattaattttctgtataacctttgccagttgctccattcctgtatgaacttggataagtcccatcttctatacattaagaattctcagcgaacaccataatcttaagagcacagtagtgacattcacaccttggcaataatcaacatctctctaattggacttaaggctcaatcaacaagatcagtacctgctaatggaactgtagccaattcttcggggctaacgaagacatgaatcttggaggagaacctttaattactactttattaaacaactacaattcctagctgcattctaaatgatttccattatgcccatggataagaagggttctcaactctcatcaaaaaaaaaccttccatttgcaacatgtagagaccattacagaaaaccacccatgatcaaaatgcagtgttatggagctcagtccaaactgattcacgtacaaaatgactctcaaacctaaggctcaatcaaggcttattacggaagagggagatgaggtgggaatgtaagtgccaaaggaacagtatgtttgctgagagattgtatctcctagaaataccagaagttacatatatgaagtctcatgtacacagttgtaaaaaagtatttttcaaaaagtctcatttatggtaattaaatgaatggtggggaagtactggcactatacctgatggcatttcttctctccttttagcacctacatgcaactgcctcatgcctgatccttaatgccccaaattttcactgattgtgggaggagatgcagcaaggtaaatctttttatgttgagaaatcatcaggaggattctaatacttttggaaaatcacagaatcaccattgccatttctttggccttcaaagacttaggcattcgggctgtggagagtctatgtttaaagtgagagggacacagtgactctttggttctttttttatgtaagaaaaactttattgaccacacagattgaaaatcaacacctctttaaaaatatttaaaagtcttcttatcatccttatcacggatgagaaacagaaaagcaggcatcggagatgagataaaagtcacaggtcaaagaagagacctgaggtttcttcagttgtgcttttttaaaatatttaaatgtaaacttttatttcctttagtttttttccattcatttatttagctcacaaataaagtcatgcacaatcatcatacagaatacattatgttcacaattgcatggctaaattaaaccaattaacatgttatatcaaacatattcatcatttttgttttgagaacacttaaagtatactatctcacaacttttaaaatatagcatattgttatcaaccatatttatcatgctctcagtagacctcaagacttcagagnnnnnnnnnnnnnnnnnnnnnnnnnnnnnnnnnnnnnnnnnnnnnnnnnnnnnnnnnnnnnnnnnnnnnnnnnnnnnnnnnnnnnnnnnnnnnnnnnnnnnnnnnnnnnnnnnnnnnnnnnnnnnnnnnnnnnnnnnnnnnnnnnnnnnnnnnnnnnnnnnnnnnnnnnnnnnnnnnnnnnnnnnnnnnnnnnnnnnnnnnnnnnnnnnnnnnnnnnnnnnnnnnnnnnnnnnnnnnnnnnnnnnnnnnnnnnnnnnnnnnnnnnnnnnnnnnnnnnnnnnnnnnnnnnnnnnnnnnnnnnnnnnnnnnnnnnnnnnnnnnnnnnnnnnnnnnnnnnnnnnnnnnnnnnnnnnnnnnnnnnnnnnnnnnnnnnnnnnnnnnnnnnnnnnnnnnnnnnnnnnnnnnnnnnnnnnnnnnnnnnnnnnnnnnnnnnnnnnnnnnnnnnnnnnnnnnnnnnnnnnnnnnnnnnnnnnnnnnnnnnnnnnnnnnnnnnnnnnnnnnnnnnnnnnnnnnnnnnnnnnnnnnnnnnnnnnnnnnnnnnnnnnnnnnnnnnnnnnnnnnnnnnnnnnnnnnnnnnnnnnnnnnnnnnnnnnnnnnnnnnnnnnnnnnnnnnnnnnnnnnnnnnnnnnnnnnnnnnnnnnnnnnnnnnnnnnnnnnnnnnnnnnnnnnnnnnnnnnnnnnnnnnnnnnnnnnnnnnnnnnnnnnnnnnnnnnnnnnnnnnnnnnnnnnnnnnnnnnnnnnnnnnnnnnnnnnnnnnnnnnnnnnnnnnnnnnnnnnnnnnnnnnnnnnnnnnnnnnnnnnnnnnnnnnnnnnnnnnnnnnnnnnnnnnnnnnnnnnnnnnnnnnnnnnnnnnnnnnnnnnnnnnnnnnnnnnnnnnnnnnnnnnnnnnnnnnnnnnnnnnnnnnnnnnnnnnnnnnnnnnnnnnnnnnnnnnnnnnnnnnnnnnnnnnnnnnnnnnnnnnnnnnnnnnnnnnnnnnnnnnnnnnnnnnnnnnnnnnnnnnnnnnnnnnnnnnnnnnnnnnnnnnnnnnnnnnnnnnnnnnnnnnnnnnnnnnnnnnnnnnnnnnnnnnnnnnnnnnnnnnnnnnnnnnnnnnnnnnnnnnnnnnnnnnnnnnnnnnnnnnnnnnnnnnnnnnnnnnnnnnnnnnnnnnnnnnnnnnnnnnnnnnnnnnnnnnnnnnnnnnnnnnnnnnnnnnnnnnnnnnnnnnnnnnnnnnnnnnnnnnnnnnnnnnnnnnnnnnnnnnnnnnnnnnnnnnnnnnnnnnnnnnnnnnnnnnnnnnnnnnnnnnnnnnnnnnnnnnnnnnnnnnnnnnnnnnnnnnnnnnnnnnnnnnnnnnnnnnnnnnnnnnnnnnnnnnnnnnnnnnnnnnnnnnnnnnnnnnnnnnnnnnnnnnnnnnnnnnnnnnnnnnnnnnnnnnnnnnnnnnnnnnnnnnnnnnnnnnnnnnnnnnnnnnnnnnnnnnnnntccagaagttcctttattgtatagggatgttttggctatcctgggtcttttgtttctccatataaagttgagaattgttctttcaaggtctgtgaagaattgtgttgggattttgatggggattgcattgaatctgtagattgcttttggcaagattgccatttttactatgttgatcctacctatccaagagcatgggagatctttccattttctggtatcttctttaatttctttctttagagactcaaaattcttacggtacaggtctttcacttttttggttagtgttactccaaggtattttatgttgtttgtggcaattgtaaagggtgatgcttctctgatttctttctgcaccaatatgtcatccgtatatagtagggctacagatttttttgagttaatcttttatcctgccactttgctgaagatgtttatcagctgtaggagttccctggttgagtttttcgggtcacttatgtagactatcatatcatctgcaaattcctttccaatttgtattcccttgatctccttttgttgtcttattgctctagctcgaacttcaaggacaatattgaagaggtatggagacagtggacagccttgttttgtacctgattttagagggattgcattgagtttctctccatttaatttgatgttggctgttggcttgttgtatattgcttttattatgttgaggtatgttcctgttatccctgatttctccaggacctttatcatgaagggatgttggattttgtaaaaggcttttttggcatccagtgagatgatcatgtgatttcttttcctcagtctgtttatatgatggattacattgatggattttcgtatgttgaaccatccttgcatccctgagatgaagcctacttgatcgggattgatgatttctctgatgtgttcttggattcgatttgccaatattttattgagaattattgcatcaatgttcatgagggatattggtctgtagttctctttcttagttgtgtctttgtgtggcttgggtatcaaggttattgtggcttcataaaaagagtttggtaatgacccttctgcttctattgtgtggaatactttgaggagaattggtatcagttgtaccttgaatttctggtagaattctgcactgaagtcatctggccctgggctttttttggttgggagacttgtaatgactgcttcaatttcattcgaggttataggtctatttaagttccttatctattcttgatttaattttggtaagtgaaatctgtccagaaaattgtccatttcctttagattttcaaattttgaggaatataggttttcaaagtatgaacggatgattctctggatttccactgtgtctgttgttatgtcccccttttcattcctgattttattaatttgcatgttcactctttgttgtttagtaagtttggataaaggtttgtctatcttgttgattttctcgaagaaccaactttttgttatattgattctttgtattgttctcctagtttccattgatttcagacctcaatttgattatttcctggcgtctactcctccggggtgtattggcttctttgttttctaaagctttcagttgtgctgttaattctctagtgtgattattctcctgtttcttcatgtgggccgttagtgctatgaactttcctcttagcactgctttcagaatatcccataggtttggatatgttgtgtccacattctcattgaattctaggaaatctttaatttctttttttatttcttccatgaattgtgcaattgggtgttacttaatttccatgagtttgtaggttttctgtagttcttattgttgaattctaattttaaagcatggtggtctgataagacacagggggttatttcaatttttttgtacttgttgaggtttgctatactgccaagtatgtggtcgattttagagaaggttccatgtggcgctgagaagaaggtaaattgttttgtatttgggtggaatgttctttagatatctgttaatccaattgcaccataacttctattagttcttttgtttctttgttaaatttctgtctggtgttcctgtccagtggtgagagtggggtgttgaaatctcccattataaatgtgtgcgtttttatgtgtgatttgagttttagtaaagtttcttttacaaacgtggatgcctttgtatttggggcataaatgttcagaattgagtctttatcctgatggatttctcctgtgatgtaggaaataaccttcttcatctcttttgactgattttagtttaaagtccaatttgttggatattaggattgctatccccgcgtttcttgcgcccatttgattggaagatctttccccaacctttaattcttaggtactgtgtgtctttgaggttgaggtgagtttcttgtatgcagcagaaggaaggattctatcttcttatccattctgttaatctgtgtctttttataggggagttaagaccattaatgtagatggatattaatgaccattaattattgttcattcttgcttgtttttgatttggtgatggtggcaagattatgtgtgggattctatccctttttcttttgactgttggtaagttgggattatctattgcctatgtttttctggttgtagttaacttccctgggttgcagtttaccttccagtactttctgtagggctggattggtggatatgtattgtttgaatctggttttatcatggaatatcttgttttctccatctataattattgaaagctttgctggatatagtactctcagctggcatccatggtctctttgtgtaggtagaatatcgatccaggactttctggcattcagagtttccaaggaaaagtcaggtgtgattctgataggtttgcctttataggttacttgacctttttcctttgctgctcttaatattttctgtttgttgtgtatgcttggtgttttgattattatgtgtcgaggtgacctttttttttttttttttttttccagtctatttggtgttctgtaggcttcttgtattttcttctgtgattttgttgaatatgttttctgcgcctttgagttggatttcttcaccttcttctatacctattattcttaggtttggtcttttcacagtatcccatatttcctggatagtttgtgttagggatttgttggacttaagattttctttggttgatgaatctatttccactagtgtgtcttcaattcgtgagattctctcttccatctcttgtattctgttggttatgcttacatctgtagttcctgattgtttacccagcttttctatttccagcattgcctcagattgtgctttctttattgtctctatttcggtttttaggtcttgaacagtttcttgtattttttggtttgttttgtcttcaatttctttaagttattttctcatgtcctctttgaggtcctctatcattttcctggagatgtttttaaagtcattctcttctggttcagctgcattgtgatgttaagttcctactggtgtatggttcctagactctggtggtgtcatattgggttttctgttgttgaatgtgcttttaccttgtcctcttctcatcctttcttctggtgggtgtagcaagtgtttcttgttctcctggtgggtgtgggaccacggttcccttctggtagatgcaaacagatccaatactctgatgtcggtcctcttctcggatggatgtgtcactgttacccgggtgttggcaatgtcagggcgtgccaggtccctcccggatgggcagttggaggcagagctgtcaccgggcctcggggtgttggatcccactgctgaactccctatggtcacttgtatcagatgattctgagcatcgacgatgagcaggacccgggaacagcctctggcctacctgggctggtggattgaggctgggctgcctctgggtgttcggtgttggtaacctgccaccaccgccgagctgggtctggcacattggtcgactctttggttcttaaggccattgacaagaaagatgatggctatctcactgtggtcctttgtagaaaagaacactagggaaagctgacataattctcccatccttttctctagagacacctgctgtggaggccaatgcccgtttgtcgttatcattagagatcattaagaatgaaggagacctacttgagagacttggaccacaaaacaaagagaaaaaaaaatgtatatctgtgaactgagaaaccacaatggcttttgaggaaacattagtgcaaaacaacaaagttacttttgctgccacaaggaacatggtgagtccatgaaagccaataccagggacttatatgtagggaaagctgtagccacgcctacttaggggttggctacaggtgtgcctgaccacgccctcgaaagctttccagggcgaggtcagggatgtagggtgacttcgttttcgattttggtttctcttttgggcttgaatacagactgctgccacatcggctggctaggtcgctctgtaagtaaggctttttcctattaaatacccttatatttctaccagactctgtattggtaatttcccactatacttatgtggtacttacaggagctgttctgctcctgacttgagtgcttcagtgtctcacttcagaaattctgccagaggagatcagggtgggatggggattggtggagggctggggaaaaggggagggtgagggaactgggattgacatgtaaatgaagcttgtttctaatttaaattaaaaaagaaattaaaaaaaaagaaattctgccagactttattgcagattgttacgtggttgccactgggttataagataaatacttgtggatctgttgttgcttaagagccataatataataaaattcaacttcactgcattaccattgattttaacggatcttttttgggttcctcattatttgagcttttatgacttggctttgaatagaagaatttcttggtcttcccaaactgcccacttatcattgaatgccagaagcatagagcatttgtcacataacaggcatcttactaattttattcatcatttccagggaagagtgtgcttctttttgctttgcctgcttcgattatgctcagtatacaaacccagctatgattcattttccatagaatcaacaacaaatgaattttttcttccaatagaactgctgcagattatcttactatgaagcatgagacactttgggttttcctgtttatgactgagcagtttagtatgcactcattttcttttctaatagatttttaaaaagctttgcacacacagcctctttcattaatgtacaaagcaaataatcactgaatgttacttgctacccagattacatggataagaacttctcccctaagttttcatttgattctttattaaccatgtaataaattgaatggtgtttttaatttttgttcctaaattatcaggagtgctttggaaacaatgagaactaattgaattccctaaggactaatgttgatacttaagatgttcttttttagacaaaaatcaatgaatactaattaattaatacatagaggcaaaacaaaaataaagggcatttatggaactgtttcctttcttagaagagtggataaaatataaaaacaaaatacaaacaaaatgtggatggattttgtgtatttaatcaattatagtgacatatttacagagggacaaagatcttccaggagactcatcaaactgtgtccctcatcatttggtaacttcttacatgttgatttaatcatgagtctgtaaaagaaagtcactggttaagggctagaagaacatctgttcctttccaggtctgacagtagggttccatgagtgagggacgatctcacagtgggcagaaatgctaagccttctggctctcagttctctaactctacccattgatttcatgaggctgaatctctgaactaagcatcactgtaaccactagccacatttgaaagcagaatctcctatttgttgttctcttactctagtctctattagcttaaagattaatccccatgactgtggtgaaatgttgggagctgcagactaccgcgcctaaaagatggtgccggtttctgccttctgacagcccaacggcgagtgctctctgtggtaaacaactcctaatttggtaaaggttatgtatcctcttaattctgcttggagacaacctatcctggcatgccacgtggggttaggtgattggtagttgtagactatatcaggccccgtcttccactacccggggccactccctgtaaatcaaggttcctgaataaactatgagaagaagattcctcggtgttgcgtcgttcttgctggtcaagggtagaagagacagtgaaaggcagaaattcatttaattagaacaaagtgtgcatggccaactttggggcacacatttttctgcagcctgttctttctttgatagttaatcttccctcttatctgaagacaataataaaaaggaagcagcttaagaagaacagcaaataaagcacaattttagtgggtttaattgaatttacctagcaatttaaaggaagtctgagaaaatgagcaagcagaaaaaacaaaaatacaatgccaatgttaagaggaagacttggcatctatgagtaatgattgcttttgttgaataactgttaggtctagatttttattaaataaattagtatatgtattacatataattaagcactgtaatctgaggatcatgctaaacaaatgctttttcacttaatagaataatatgagtgtgtaattaccattaatcccttttaataaaacataaatcgtagtttggaaatatgtagaaaagtttccctaatcccatgttcaattagttcagatgagttcatctaaactttgtagttggactccaatgtcctgaatttcaacagccactcttatctactggatggtgactacacaaggaatatttgagccttaatcaaaataatggctatcatgagagttgaaaccataattcagcaacagtttgactccaaagttatattttattgtataaattcactttgaaagacaatgaaatttctctatagctaagtgacttgtttccatttaaatttaagcagtgtccctgcatgtgaccagaaagttgatgatctggggaattcttggaaagaatccacgactacaaagcctgaatgagtgatgaagatgtaaatgatattgagagattggaattttgcaagtccacagacaaattccctgggaacattttaaggcctcttagtagccaattttgtcctcctctgaacatgctctaatatgtttgtaaccatggagtaagtcctttggaatgtaaggacagacctccagtgttactacccaaagcaggttgtcagatagcatctgtggcctataataaagctttccccactttctctaacccacctacatgacatacctaccaatgtgcctgaaaatgtggtgttttatgactgcctttgtcccattacaataaaaaagctcattaaattgctatcttattggagcacattatgtggcaaatctgaatctgtgttcctgggtagtattattcttattgagcccagaatgtaccctttctcttgttcctttgaggtgagagctgtttctatcatcattagtgtcctgtaagtaagggacagagttcacatgagtatacagaatgggatgagagagacttcctttaggaacacatatagcacagagaccaatgtcctctacagaacacagcttctctacaattggccaaagagaaaaaaaaaaagcatgtgctgtcacttaatgtaaatatccttgtcctgattaaataatcaaacatttaatttacaaaacttttcccttcaaaccatccatgtcctttgccttttctcagtgagtgacattgaatttcatgttctttagctttccttcaaagtttaagagagtatcaacaatctgactgaattaagcatgctatatggttgtatctctatcaagaatgaatagtaaaacaaaaagcaaaacatggtagataagcacaatatgtgattgccatcaatttctgtcatgcaacattcttaaaggtttgatggaacaatttataaagtattggtgaatgcctgggtattagataccagtactatcagtgttaaattatttcagcatgcgataataccattgtgcttttgtgaatgaacagctatattcccgggactagagaggaaacctgagctgaacttctgatatctccaaaatattcctacagggaaataagtctttgggtagagaatgggactgaaagagtcaagactagaaaatacttaaattagtaagcaaatggtgtgggagagctcttttcactgctttggcctctcctctacaagcttaaaattaattaaaataattttaaaagttagttactagctttattcattcctgtgcctttcagtattttcctgaggctgacgaatcatcctcgggtaaataactttgaaacaaacaacaacaaaaaaatcaaaccaaaataccaacactaagtgaaatctctcacagttcagtcttctcaggaaaatattgagcactgagccagagtgggtgttggggggctcttctcttggtgtagatgctacatgagatgaggaatcgaagtttctagtgattgggaattgttctacacaactgtgtttgaaagccattttccccgttggaataaaccagaagtgaagaaattttctttaggacagctctgtggtgtgtgaatttcaacaatgaaatattcaacattaaaaacaggttactggcttcacaagaaatataagaggataaaattggcagagaatatggggagaggactcacactgtctatggaaagcgtctttttaggtaagcagtttttttcccccctgaatacaggtagatacaactaagatctttaccttaagtcagttattttgtgttggtattaagaaataatcaagttatcaccattcacagatttcaaaaatagtttcaaaagcatatgtcttttaaaaagaatgaaggagaaataaagatacaaaaaggaaaagagaaaaaatttcgttgagattaaacattggataacctgtatctgaggtctgataccttctctccctggatggtgaatgtcaatttttgccaattagtttggtatgtatgaagatgaaaatctcttagttgcatagacattgtggacaacaaagtcatatttacagcagcaaagctaaatttttcataaagtaacccatatatgagttaatgaaaaaaggttttaagaattattgctagtgtggttttcatacagttaataaaacagcgttgtggcagttagcagaagctagtacaaagcagagagttttttgtttaatcctgtaatgtcttatttacacaaggaaggtttgatttttcaaatattgaaacctacttctggtttttgtcttgttctgtgctcagccttctctttgatacaggagaagagttctggtttgggtacattgcctcagtagtcacaaacctgcctgctaacaaattcactcatgacccaaacacagcttgtgaaaatatagggtttgtttttggtttaagaaaatgagaattaaaagaacaatgaatcaaatgagaataaagttaaaagaaaattacaccttctgacctgctgcaattctatttttgttttgttttcagtgatcaaacaccttttcacttcttctgacttctaaatagcagtaattatgttgtaatattacactgtaattttaatgatggcaaaaccaatacctttatataagtctgaggatctgaaaattagggttgcaattactttatgtgtccggagtcactgactgttgttgtttctcacactctgtgtgaaggcagctatcaaagtgtcataccatcactgtcagggtgtctgctgcatggccatgataaactatttgatttttaatcaggatctggaaagtgctggtttagagatccataattttaattgttaagtcatcgaactagggccattttagagtatagtcaccaaagcacacaaaagtcttgttttatttgcatccaccttgcactccacatgggagcacaggccaggaaaaggtcctagttggagagaataatggcagcatgggcctacaaagaggatatccggccagaggctcctttgatctttagaatgctccctcctccagtagctcctcctcttgggatgctagcaagaacagcaccttctaacaagacttcctgaatatgcttggtgttaaatgaggcgagcagaaaggcaagctcatggctaaaataaatgtgggaaaacatcataaaacaaaactaagcagtgggaggacttctctgattctataatctaagctacagaagagcaagtgtagagaatgtttctgctgttttatgttaaaaaatatttctttcccattttgtactgaaaattagcttattgttaagatttatatctagtcaaattccttcataaagtcatctctagtcccctcagtgtcgtggcctggccagtcttggctctaagccatgacagccatgaggtttggcctgagtgggggagcatgggcttggaaactcctagcaacccaatggagataaagaccaaacacagcatcttgtcatctttagagagctctcagttgcaagttgtaaaactagagtctcttgtttatttaccatcttcttgggtgtctcttaaccatgcttccatggccatgaagtcatttctctccttctgacccctctttctgccccatagccctaactctctgtcctcacatgttacttatacacctagcaactccacccaggcctcaggattcatctctacgtttttgcacattactgaacccaggatctcaaaaagccccgtttccattacacactcccttcttttgctatgccagaactgtgtgtttgttttccagaagtaaaccaccttgagataacagttcttaattgtcatagtggggtggcatatctgcttagaatgttgaagacattcagtaatgcttaacagttactaatcatgtttgtctcaactacatatttattatttcaagcattattctgaaaaaataaattttttcctacactttaagaggggtagattggactcttttgtttgtttgtttttgttttgcattgcatgtttttactccattcgatattgcttttgactcaccagtagagttcatcaccataatccaaacttatatcaaaataattccagacaagcaaaatcatgcaagggtgcctttattaagttttacattctaattccagctagggtcacaaaactcagaggggataaccacagggaacagagcaagtcactctgtagccattgtgcagattgagtaattcaaggagtcactgagggacagagcttaaatcacaactggtcctctttaccaagtaaatattccaaacattctacaatggaaagcacatgaccatgacagagtcacagagagcttgcacctaaatctatcctttcagtctagggcaagaattggggtcacatattagaaggccaatgattctttcagattaagctacatgttttctgtgtgtgacattaatactgatgaatcgcttatgtttaagaaatcaataaatggaagtgttaaaggaaaacaccactataatggtgactataggagatgtgtagtcatttctgaagggtttctcttcactctgctggcttctttacgagttcttctgggaaattttcatggcaactgtcttgagctcagtgtattcataaataccatgctcacccctagaaagggaagaaaaattgctcataagcattgttatgcactgcagcgtaagtcaactataatttccataatttggtgcaagtttttttcttgcttatctgaatagaggcaatgtaaaatgtttattgaacacagtatagttcatataggtgctagcttatcataagctttatgaccaaatataaactcctcagtggaaagcaatattctaaaatgttttattttaaagaattctgtgctctgttttttttcacagaaaatatccattgtttgcattactttacttgaccatctgactaattacccaaatcataattcaacctggttaggtttttatcagatcaataaggaagagtgatgtacttcatgttgtactgtattccactgaagaccagcagaacaaactgtcagctagagcctgcattcaccatctgcactgtcacaggaatagtgagaggttagaagatgaccagtatccactttcagtcagtagaagctgtagttttaacaggatctttctattcttggcaaaaccaccacctaatttttcttggtctagttttctatcttttgaattgattgtatataattttaggaagaaaagaaactaaagattgtcctgattcaggcttttggaattttggcagaggttggctttctgtattcatcatcatcatataataccacatggaaatctttatgtctaccataagagaacagcagctgagactagtatatctgtagataccacagtaactttaaccagggttttaccccagaccaattttggaaattatggtttctttctacatagtgcatgatttatctaggaagattgtactcagttatgccctgcattgttttggtgagaagataaaattacatgctcataggaccactctcaacattgtaacacctatgcacacagatttgcagaggagcaggattttggtcctttaccagcactactcccgaaacccttctcctgtatatgtagagaatgtcttattctccccagaaacacaatttccttacactgatatttttctgtgggtaattaaagttttgaaaatgcatcttgaaggcttaaatgagaattttttttcacagtaattaaagggcttcacctcagctctctaaattctattaaaaggtagtattttaataagtgtttttaatctcaaagagatagataatttaacccatgattttgaccaagttgttttccattctatttagagctttagtgtcatccatcactcattggaaaatcatatgtttaattgtgatcacattgaagctgatactcttaggatcttgtgcatgtacagtttcaagacagaaacacagtaacatctgcttataggtctttttagctcagaaagactatgccttatgccttactagtctgtgctctccagaccctactatctctgtttctaattcctcactacacatcaattggaccttttattgaatactgctgatcctatgcccagctctggatgaggtctgccactgcatttccactaaaattctgcatggtctcatgattctcatcacagaccatgtaatatgtgagaaattaacaagtctcagagaaactgctagagttgacaaatataaccaagcaaaagaataaatcattctacttcttgttttaaacacaatgtttaagaggatctccctgtcacatcactagactttgtggtttccccatgggaggtctcactctctctgaggagtggatgagggtagggtgaggagaaggtggggggagtgggaagatgtgaacaagagggaacagggattgatatgtaaaataagattgttttaaaaataaaaagaataaaaagaaaaaagaatatctccctgttcccattttttataaattgactgaagaaaaaaatggcctgtgaaattgagagtgattaaacttggaaaattcccaagtgaagtaagcaaacaaatggaagtgaataggattacaaagagccagatcttcacctctcaatcttttccagtgccaccactgaccgcagatccacaaatccaggcttgggctccctggactggattagcagtgaacacactgggaactgcatatgcccaatcttggcccttgttatcatctgagttaattctgatatatatatatatatatatatatatatatatatatatatatattttccaccgtgtaatctgagagagcctgggattcactatataatcctggatgacctgaactcacaaatgaagaccatgctggctttgaaatcacagaaatctgcctgcctctgtctctcaaatactaagattaaagagtaattcacaatataattcttgggggtccttagagatggtcatttcagtaattctccggtaatagtttacaccaaatgacttggttaacacatacacaagttattagctaaacttcaccagaagcatattagtttggggtaaggcaactttaattcattaaagtgctatatttatatatgtagaatgtttccacatttatttaaatgcttcttaagtttatcagtttaacctttttctttcagaaaaggactcccaaattgcttatagttgcttatatcataggcaatccaaaaaagtagacaacaagcagctaccttggtggggtacttagcagtgtcctttatggacagtaagagtttaacaaagcataatccatctgctattgcttttctgcacttttgaagtatttccaaaattttaaatgttattttctctaaaaaaactccaaggaagaaggcaggcgtacttcactcaaggtggtgaaaatggaacagccttcttggagttacaatccttttcacaaaaatatgtttgtaatacaaagttttacttacagttcacgtccatttccagacatcttgaatccaccaaaggggcactggggtgacagcatcatatagcaatttacccttaaggaaagaagagaaggacataatagacaatacttaactcaccccataattacaaagttggatatgaaaagaatcagagttctctttaaaaaccccatcatttagtataatatacctattgggatgagagaaaaaaacaaaaaacaaaaaacgcagtgccgtaatttcgaatgcagagaacaaacgtgtgttaacctagaaacaaataaatagtacttctgtaagagtgaacagttataaagcaagatttgtctgaattacaattggaagaaccaatgtgccatgaaaagagtgtctattttgttggaggctgggttttgtctgctgttctttgtaggcagctttgtaatgctcatgtagttaacaaggctaaactttagaagttgcagaagtgtcaaaatacactgttggtttcattaattggttaatatattgctttctcaaaagtgttggcaggaattggaactaattagcaattttaatcagattttatagaagacatgaaatggatctatagagaagtacattataaaagcatgattagaattacagtgaggctcaacagaagatcaaggcaagagtggtagtgagtccagtgtagttttgcaggcagtaagttattactttatagaaattatattaaaaaagtggtgctttatagggctgttgaattttgtcacatgatgcaggaaacatgctatttgaagtacttggtacacaataagccttcagtaagtgtggctgatgaacacatgatattttaactctgaatttactagtatgcttactacatgaaaaatctttattaatcaatagtcagatgtatcatacaacaaaagaatttgatttcattacgtgtcagaaaatcaaccatactcaaaacaagaaacaacagactttggcctggtgcttagtgctaattatataataacattacatgaaagtttaaaaagtgtccttcaaaagaactatacccagagtcaatcccaatatatattataatgagaagcttgactaatatcttatgtgttcaaaataatgttacatgtacttatttattcattaattcattcatttacaaatttgtttaatgaatacatgcatacttttttctgtgcatgtgtgggaaacactggatgtcttacacaattgcagccttatatttcattaattagctttttaaatttcacttatattatagtcatggataacataaaattcatgatttgtttttcaaactattgttttaaaattaattttatttttgagaattttataaatttttgagaactgtgttcacactgtttccattcttccttctaaataaatatctattattgagtccatttggcgtatttatatgtgtgcatgggcctgtttttatttgaataacctgtcttattttctgagacacagtcttactgagcctggagttcaccaattcagttggattggctggccagcaaactcctggaaaactccttctgtctacccagtaatgggttacagccaagcatcaaagcctccaggtttttacatggcttcagggaatctgaatacaggtttttatgttgacccaagcagtacttcctagctgagcctttgcctcagacccaggttacctgtttttaagttctcagatgatacaggatgagaatcccttatctgaagcttcagaggactcaagtgcttcagttttgaagttctttagattatggaatgtacacatagattttattggttgaatatccctattgtttttatgggcatgtgagtgttcctggatgtatgtatgtgtgtctaccatgtgtgtctaccatgtatgttttttggccatgcataggccaaaaaactatatcaggtcacctggaacttgatttccaggtggttgtgagctgcccaacctgagtgctgggactgagtttggaccctctgcaaggtctggaagttctcttaattgatgagtcagctctccaactctattcccctatttctgcaaaatgtatttatttaacgtgtatgtttgtgtgactgattgtaagaggacttattagaggatgtaatgacctggctctcactccactattcatttcatggcctccattgagttccttaatggttcctggttttaccacagatgtggctaataaatagtgtcaggtcagtttaaatgatgaatataagaaatacattgtaactttcagttactagtgactaactggtgactacctttgatagaaggaaagatttttaaagctatcaagagggtaaataattgtttggtcatgtttttaggatgcttttccatgcttgattttccttaactggactatgtgagaaaatagaaataagcattatgttattgccgcctggacagtgggaaagcaggcttaatgataaaaaggttgctgagtaaatggtctagggtgtagagtcaagtaggcacagcagtagtttgagaggcacagcctgagtatcatgtaagttaaactataaaaatcaaagagcagactaggacaaaagtgagagaaaatacttcacaaatttgttatgatcttctaaaaaatgacatgtctcaaaaaaatcccagagtaagaatctactatagaaaacaagaaaaagaataatttactatacaagctgaataccaccttgcctgggatgcagacccataatcccatatataattgaacttactgagttgctgaatacacacacacacacacacacacacacacacacacacacacacacacacacacacacacaaaataaagatggagacaggactgaggggcagagtgcttgcctatattgcaaggcacaagatacagtattctctgtgaaaaagaataatgacaacaataataatttttggcatacataaagcaacaaaacattatgcaacataattaaacttggagagaatttttcttttatgttcattgttcaaaataatgcctcataccttgaaattgtctagcaattcttacaatgtacagaataacattcataaaatttttggataaagttaatttggcttaaaaataagacaattaactttcttagctggtcagataatttctatgaatatcaagtctgaagggggtcaactcagcctgcccatgtggctgatgcaggaagggcactccttacttttagatgcacttaccacactaccccagcctgcagagcagaagacacagtgatggccttatccacatctttcgtaaagactcctgctgctaggccatagctagtattgtttgctctcttgatcacatcatctagggatttaaacttcatgatctgttgcactggtccaaatatctagatagaatgatatgaaaacaggtttacactatatatgctacatatgctttaaatacactagatatgcttcactagaagccactctacatggactatgtgtaaggatcagaaccaatggccatggccaatgaacatggaaacatgttgtgatcatgtgtgacattctctatgaagcagacaccaatcatgatggcagttttgtgctttgatagagctgttcaaaatataaggactgaacatcaaatcactacatgcatgatttccttggaaatatcttccgagttatttccagttttcttcattgttcaagttactgcacaaggcaatatgaccaaaaaagcagtcctttgctctaagagtaacaaatagacaatgattgagaacactgtttatgcttttaacaccagtgtattattgatttaaacatcacctttcaatgtatttgtatcatttcataattataaatattgtataatatagcataggtgtttattccttagtgtcactcaatactatacaccattactaaacactggaaccactccacactaagtaaagcttgaaatccctggcagtgactatcgttactcttgcttattccagtgttaccagtatttcatttcagctggaatctagtcaataaagcctacacacaactcagtctatatctcaccccacaagtaagtagaaacaactgggttttttcagtgatgccattgtcttttgaaaagatattaatcaaaattaagtgaaagagagtattcttggaatgtcagtacactttcctgggaaatacaagcatagttggcaaatactcagcgatgtcaaatggttttctgtttctgagtcaatatgagtggtatgggacagttagcagcaattcctcgaaggctggggaagattctggggttctaaactctctcatgaccctgtaactgggaagcataacagtgtgagcactgtaaatggaaatcaattggagcagagctatggtaggttttctaagagctatagcaacatagcctagacagtatgggctccaggctcccattctgaagcagcaaatgagatatttcagtgaatatgttataggatcacaatcttccttgaataaatattattttctgttttattgtccttcttacccatgtagatcaagatctaaagaacaataggtctgatcaaagaagaactggatgataaggtcagaaattcaaatgcaattgaggagtgaattgatgcaaacaatctaagtgtgttggattatccacatacatgatgtttatttctggtgtttatatttatttcttcttcttgaacagctgaatattttgccctttctccttattttctaacattgtggagtaaagaaaataacctctcagatcctctgttgtatcagggacatgagtataaattcacggaatggagaaattatggttctgtacagttgagccattgtaatttcttattgtactgtagcagtaatcctttcattgtttaaggcagatgctcatacctctgcatatagcagacgccttcataagcaagatgtatattagttactattttaatcacaaactagttcatttttgttacatgttgtttattggttatcatctttatggatcctacttagatagcactccacagaactcactttcacttgccttacaaagccagtccactctctctctgtgaggatgattttttttagttctttttataacagatcattcagtgtatagtgtgcatattggtttctctttttacaaatgacagagtcatttcccatttctctaaggctgcgaatgaagcaactatagaagctgatgtggactttgtgctgtgtttgatacaaactgtttgtagtcccttggattcctcactgataagtcttgatcacaaattattttagattttatcatcaagcattttagggaatgctgttaaaggaactgaacattatagagggacacacagtttacacacagaaggatctggaaggcccagaaacagaaccacatggaaccattacctcctctttggcaatgcgcatgtcatcagtaacattggagaacactgtgggctggacaaagtagcccttgtttccccagcgtccaccaccacactccagtttggctccttctttcttcccactctcaatgagatcaagtattttctcatgttgttccttgtcaatctagttgaaagaaatcacaggggaaaggggaataaaaacaacagcaacaacaacaacaacaacaacattaaatcagtggttcaaaagctgcaggttacagctatcagaaaacatttattttctatggttttaggaactgcagccgcaaatttatttttattgctactttgtaactgcaattttgctactgagtggtgtctcagttcctaaggcctccagaaatatgtgttttctgatggctgtgacccacaggttgaaaatcaatgcatttaagagagtcttggacactctcttaagtgtgacagttctgcagagttcagctcagtctgcctagtctcaggcattttttttctgtgaatatttttaggaaggaaagcttaagggtttttgtaaacttagtacatttacaaagcattgcaattggcaaggtagaactctagggactttttacacatctgccatttattcaccttggaagaaatttgctaacgatttagcacatatgcctgaacaaaatcgtgatgagaaaagaatcaggtccagtgggtatgtcactttaatagcagctgcttttgactgtaggaggcctttattcttcacaaatggaatctgcctattcttgggtcatgtctactgctctggctgccctttcatactgtgtatgagcagaggttgtaggtcttgctccattcagtgcagtaggttgcatcccagtttctaataatagttgattatcatcttcttgttccattaaatggaccatgtctaaataatatgatcattgtcacagaagtatcatgtgctaagtaatgttctgcataagaaagaattaaaaagggatctcatttctggttgacaatatcagaatcactaaacactcaacccacttgctgagacacacacgtttcctattaccccagttttcacagaagtgggaggtaaatgattaagtgttggattccagatcatctttgcaaactgcctgtttgaggtgtgactgggttcacataaatggaacaattagagaccaaggaactaaaaagagggggtcggatttggggctggtttattttctgtcttgaatagataactggcattctttatatcattggactctgccaatcttcttagtattcaaaggatcagaaaagcttgcatgatgtgctttctaattgcttatttaggcctctacatttagtcagggtaaattctagttgttatcagttgctaattgagataagttggcatagtgcttgtcaacctgttgctccaaaattttcatcgtgcaaaactcaaaaaaaaacattcctcaaagatattatcttcatttgttatctcttgtggaattccaggggttggtttaaaagtcaagacactgatattactacatgcaatataaccaggctaagttatggtatcatgtaggtatgcctaactgggatgttctggagttaatgtgcagtcaagtatcctttaactccatgaatatcttctctgtcctagtctcagaattttttcagggtgtgtcctgaaattcactatttttcagttctgtttttcaagatatatttctcaactcatagtgcttctctgtctttaaccaaaaaatacccctagggagtccagtctttgaatatttgcttcagaaagagggaaggctgaggtatatcatactagataatgggactaataatagtaatctgttatcataacacacagtctacaaaatggcaaatgtcactctgctgatataatggtgttaaaatgtgtgctttgatttttttcaatgtgagaattttttgttttgttagatttcatgtgttagaaaatcatatgaaccaaaaagacacaagttcatctctggaaaccatatgttcatacccagaaactagagatcaataagtaccttgaggatagacatatacatagcttattatttttaagaagagaatggttatacatgctcttcttagaatactacaatactacacataaaattgtcatcatgtattattatgtataattgccatcatgcatagagagatttaattggtattgatgactatacaaagagataaacatcatgttggctatgtcatgcagtttatctcacttcactatataatgaatcctcaagatttatactaataccactgcttaatcaacaaggaaagtgagtggagggaagttcatgtgtttttttttcaaataaaaaatattgatcattttaagcttttatggatgcatttgggtccacgaaaacaaataaaagtattactttataaatgaaaacaatatgtgtatacaaatactcatgtaacacaatataaatgataatatattatatataagatataaatactatactcataataaatagtataatatagtatagtataatataataatctgcctttgaactgaaatgcttgcaatttgacacctttgaaaggagaacaaaatattgtaaaatattttcctaaacaaatgtgtttggcattaatttcccctaaaattatttttgttgtgatatttatgaattctcaaactctgtttaaaaagtctcagttactcaaccagcagtggatgaagcactaggcaaaagttggtcaatgtgtaactcttctcataatatctatcttattacagataaaaacataaagtagagaagactgggggctcctcacgcttttgcttgtcaacatgcctgcctgctctctgtatccagagtaacctctcttaaaaaggtatacacttacagagagtaaagccatgtaatagtcaattagaatataggattgtttactttagaatcctacaattcagaattctattttaatttagcttataaataataaggcattgcctctcaattgaaggctatggctgaataacacagaccccttgataaaataaaatgactattgttcaatgtgaagggtttcagataatctctgcttctctaccctttgtcatctaaggacatacctattatttgtctacctattgtctatcattcatctacccacatatcatatatacttatctatctatgtaatggtaagatgttttatatttggatagtagatcaatatacatttaagaagagaattgatgacatcaaaactactaagaattccatcattttttaaatattagagcaaatagggattagagaattagcaaataggaaatcagcaactatctttatacactcactgaaatcaataataaaaatatataatgagactgagacaatgtaaataataccttcacttgccagttatcttgggacactgctttagtcctacacatttcctacatgggtactttgattgaaaagaaacgctaagagctttgtccaaattatttatatgataaagtctaagatgctactgaccatgttctctttgggatttatggcttttttcaaggtactctcatgaggtacagctagtagcaatgtcccctaaatttgtgctaatagaatttggtttgcagttgttaaataaatcaagaatgagttttggttccaattcaacagtgagaaacagtgtatcatagttaatgtaaaagaataacagttccaaggtcaatgtccagtccctagggcacagctctcaggaacagctctaatggcacttggggacagtaagctcattgttgtgaggttttcttgcttactgttgggtggcatctttcctctgctcactagatgtgagaagatccccttcacctttttgtaattacttaatttgtctccagataaggtcagtttttgctattgtgggggctgggcaccactacctcaggttaaggctcactgttttaaagaaagatccagaagcaggcgtgaactcagaaacaaaggtccataaagcttgagcagaccataacagtttatgaaccaaagctgtacaggatgaaagggtgacctttgcgtgagagagacaaagatactcatatttacagtgaatgtaactacacagaagaaactcagagccacttgggaaatgcctgcttctgataactacagagaaaagcatgtcagaagcccataaaccagaatcttcaagaacacttacagtatcattacactagagaaactgaggaccctgcagaggatccaggagagctcaagtgcttatacttgtagagtgactgctgaagtcaaagactgattatgagggagaaattacagaaatctatgtgaacttcgaagaggtctacaaattgtaataggaaacaaaaagcatacagactgaagagggcaaggaactgataatattggaaaaatttcctctttacctcttgtgttttatgtgtatgtggtgtgcactcagttataagtatgacagtgcaatgtgtgcagaaggcagaggttgacattatgtgtcttttactctcactctctactcctactctagataaggtatctctctgaactcagaacttagagtttggctattctagctagtcacattgccttgggaaattcctgccatatttcatgaactttgaggctaaatgtcagctaccaaatacattcagtttttatgtgagtgctagaatctgcactttgaacttcatgcttaaattgcaagaatcttatccaatgggttatctcctcagacctttacatgtttaattccctgcattattcctaaactacttctagacacataaaataaaaactgccaacacaaaattagaatgatttttttcctattggaaattagcctctttacaatgaggtcagcgtaataatgtgtagatggaagttctatcccacccagtcctgtgactgttacaagcaagatatcaccacaatcatgtccactagcaaagtgtatagctaagaggtaaagttaactctatcaaaattagttcaaagtagttcttaattcttgtattgtaatgcttgtcttttttacctgagggccttggtttattcctgtgttcagaggatttccaagaacgtatttcttagctcgctcaacactccttctcacaaactcatcataaattgactcctcaacgaaaagcctggatgctgccacacaacattggccttgatggtagaacaccccattatgtgcaaactcaatggctgtgtccactgcaaaggaaacattcacattaaagcagaaatattttctatagcttatatgtgtgtaaatgtgctcacacacatggacatgcactgaagagatggctgagtggttaaaagcacctggagctcttctagtgtactggagttgagttcccatggctcatgaaggatgggtcacagtctcctatagctacttcctcaggaccactgaaactctcttctggcctttggaggctcccacacatagacagacatatacacacacatacacacaacatctgaatcaaaataaaatttttagatgtatttttttctcagatgaaaaatggtgataggttaaaaaaaactcaccaaacacacatagactcaacatatttcacctcttggaagccaaatgacaaaacaatcttgataatctttttattttcaatgaaataacaacagaaagaagctggaaagagaggctaggccacctttaacacagaccttactaagactatagacttgattgtaagaagaaatagcaatgaaaataattttataactctttctaatgattgaaatatctgtgactactttcagattcagattttagctaataaaatatgaaatcttcccttaaataatttcaagaaattcatgtactttggtcaaagggaaaaattatctttttgagaacaactattagtattcagaagaatcactcaccatatgaattttcctctagacaagacacttccaaaatctatctaaaatctatgtcatacatgcacattcattgcttagtttatgtggtacaatgggaatagagtttttattagaatgctgttggttctaacaaaataaaaagaaaggtgtgtgtgtgtgtgtgtgtgtgtgtgtgtgtgtgtgtgtgtgtgtatgtgtgtgtgtgtgtttgtgtgtgaattttatgaataagaacgtttctatttaatattatagaagtggggtgtcaatctgaggcaatagtaatggcttcagttgtagttaggagtgataaactagggaccctgtcatgtgatgaatagtaaactgaaagtaaattctaaaatctgtagtgaggatcaccacagtgacaatagcaaagataatgcaccgtttgtgtttatagtctagttgtaattatgcagttaatgaagtaagaggaaaaggaataatggaccatgaatttcagtgaaattactcctacatgataagtaactgaatatttcatttgttagtaaaatcagaaaggtttggaattttacagatgtgatcatatccaaatgataaacttaacatattcaacttcactaacattaattgaaaaaagagaaatcatttaaataagtctaatacactttattcttcttatgaatggtcctgagtaaagggagaaagaaattatgcaatttgtgacagctatactccttttggctccaaatgtcttaagtatttcatgtcctcggcacaattaaagaatctatgatacaaaattaccaaaaccacatcacagatcctagatgcaatgcatttatactacctcagattgaccctcagaagcaataagctattccaactcaggacaaaatcttctctgtgttttattgtctgtatactacaggaacaatttgaaagctttgcagaatcaccacagactctagttaattccttacaccttgaagcaaagccatttgcaagactccagatgactgtgtgacatcatcaaacaccaggaggaagaaggtgagatgctagcaagggacttgcacttacagtcagcatctgcaaacacaatgcaggggctctttcccccaagttccagggtgaccctcttcagattgcttttccctgcagcttctttgattaatttgccaacctgaaagcagacattgcagagaaggaggcttagtttcttcacatgtcaataggttgttttaatactttccatttataggacatttatatcaccctgtaatttaatttggaagaaacatgaaacggtgtcactcaggatctggcaccttaggtgtaaaaaagcctctaccattaagtctgaaaatatgaggcaaatcagaaaatgcttgtaggcaggagaacagacactgcaacttgagagctgactttcatgtgtgggccgataagagtttatttttcactttcatcaaaactttctctctgtatttgatcagaaatacccccaaacatctgatgcattgacttctctacctctgatgacatttagagaactcagttcttcctttgtttgggctcatctcttagcacagattctctttgagcccttctctgatgattctaggtgggcgtgattctttttcctctggtctcccaaagaaacacatgaacatccatctggaataccccaaatggtatcatacacatctgcaaaaatttcccaatagactgtcattttctatggccctgtgtgtttatcacatatgctccttcaccatggtgttcttggccctgtgctcctgtttctcctacacatggcacttggcacagtggatataaaagaaagaggcaggctctgatctctatgttcttcctcaccttagctggaatcctgccattctagtttcttccttaattctagttcctttgtctaaaagaagacattgatatcattttattttaatttctctctttgggtcccttcaattgaaggttgttttctaaaaaaaaaaaaacaaacaaaaaaaaaacaaaaaaaaaaaacaaaaaacctgttcttcttttccatccataaatccagctttcatgaccacttgtacttctttctgttcaccatgaccacattctactgcaaagatctttacccaggtgtctagaggtacccctttgcgtctttaatcctctgtgtttcctgggctattttacatattggattttaatgcaatgtttctctcacacatatgactgttgagattatttctatgtggatacttcattgcaattgtgcatttcagaaaagatattcactctactaagattttcattttattaatgatctcaatttaattcctgaaattagatgaatagacacaaacaaatctagccatgtcctggggaacctctacctgaaatttatcttctctttcagactgttgtcttgcttcatttctgtccatttatttatttatttatttatactcctgaacaagagtctttgaggctagccagataagagaaagagataaataatataatatttataaataagtacttatttatacagtgtaaccctgtttagctcaatctggcttgtgattctcctgcttcacttcccaagtgggggtagtggtgtatgccaccatgtcaagtctctgtaatacaatctttgtgactattttcatttaaaaagtttctgttttctctacaaaaaattttatctttttggagttacctgttaagtttagtagaaaagttttggcaacatagctaaaccttgtaatggagtaaaaccagaagacatttcctaaagccacaacccacatggcaaagaatgtgtaatacaatggctgtgtagaaatatgaaggaggaataaagattttacatacattgcacattcaagtggacaacttgtagtttgcttgaattttctcagaaaacaatcaaataatttttatcctgtgatttttttccccttccttttaaaaagtaaaattttattttccagaagaggacaatgagaatggcagaaatctaaacttgctgcatcctgtgaagcagtgttccaaaaaatgtgtcttacactgtgtggctacagttctttataaaaatgaattatttgaaattcttaatatctaaactacattaaattttttgttaaattgttttgttgttgtgaccacaagagatgcaatctatcatttgcttctggattaagattgattcaggatctttagtctaagtcaggttacaagccttgaagaaaacaaatgaacaagttcccacagagcatttgtgtgggaataatgctatgttttccctcactgtggtttttaaaatcatgttgttaccattttgtcatttagaagccaccattctctggctaaccctgaacaagagtctttgaggctagccagataatagaaagagatcaatctgcaaggacactcactgtcctgcaagggtagtgggaacacagatagaaacatgtctagttcatggttttatctgaactttgcataggagcagtgtgggaactcttgtagttaggtaacaggagcagataaccacatacaaaccaaagcctgggaaaacgaaattacaaggacatttcgagttctcggaggggtactaaatgtcttcttctacaggctctcatttttattatgtaaaactgagaaaaacagatattacattctacttttcaagtaaagaaagtcaaatttggcaaagacactgaacttctaggggcattgtacttagagagttagattggaatttgagcccagattttgcctgatctcctaatttccatctttattgaggagtttataaaaaggcctcaaaatggttcatgtctcaggatcacttatagcagttgaacattcatgctacctctggggtcaggaccagaagccttcagcatagatgccctggagaaggcacaggttttggacccagatatgcccatggcttccccattgcaggcagtcccaagattctatctgcctgccgtttccttccctgatatatcacaatgacagaagttatcagcatgtcttgtacatcctcacatctttttaccccatagaaaattctgaatacagtaattttaagaagaccatatgtcagtcatagattttcaccatgtactatttttctactgcccatgaaaaataaagaaaatgtgttttagaaggtcaagaattgaataaaatagaatttaaggtttatcaattcaacttttgagaagttagttgcttcgatattttaataaacttctcaaaagttgaattgacatacggtcttcttaaaattactgtattcaaaagtcaggcacacagatcactgaggttctccagaagaaacatagaaagaaatgaattttggtccccttctcaggctatgctgggtagacagtcccaaataagacactaaaggtgagactctactatttagttttcttgttctagaggttgtacttacattcactcatatacatcactgtggtggaatttatatgtcttaccagatactttaccactcatcagacaacctcagaggctgtattaacaagagatagtaataaacacattgaaaatggtaatctttctccaatagtaacaggtattttcttttatcctaaattcacccacttgtctttgataaacatggacagaataaggaacaaatcattgaaataactttttttttcagaagtgttggttaagaaaaagctgcggagtacatgcttgttctcattagagatgaggcatccgaagactggtactacctgtgttgatcccgtaaaggccaccttgtcgatgtccatatgagaggagatggctgcccctgcggttggtccataaccagggacaatgtttactacgccagggggaaaccctgcctacaagtaaagaggcaagcagtcaatggaagaagaatttaattctcaacagagacacgactacatgacccatgactgaagctgctttgttattctaaccttaggagttttttctacccagaaaatttcacttaagtgtttattctttgttattactatttcttttctttttccacatgaaagaatactcaaaggtgataatactgaaaacactttttgccaaatccgtatatcacatcaatggatcatagttccaagattagctgtgtcaaatgtcagaagggagacctcattgagaaaggatccagaaaagtatgataaagtatgtacatagaaagaaggctttcagtatcatcagcaaacctaaaaatctagagtcgtcacactttcagtgcttacctattgcctttgcaggcagagcggctacatgccaaatccctagaggtattgttcaatcagtaaaaaatgacataaacaaagcctctcttcttaggatgatagaatgattcctatcctactgaaatcaacaaagacagtcccactagtttgatggatatattaaaatttcaagatatttgcattaaatgcctcattctgacaaaaggttgttcattttaatttgaaatgaaaagtatctgaaagatgttttttcagatttcaaaattctaagtttgagtttttggtatgatattaagaacaaaacccagcaaattgttttttaaagcatgaaataacacatgttgaattaatagaagttccatgtactctttgcacttttaacagaaaagaacctgaagatgaagctatgatagataagagactgtaaacaactgttttattcttgcataacatagtgagtatattgacacatgtggcctctaacctacagccacattcaaactaagattactgaaagaattcacagaagcaaccaggccagttataaattcctcagtgacaacaaatatttcagcatttgaaagaatgccgttatttcctcaggaattatgctcatgagacttgaacaacataagtaaccggttacaagatgactggctataagcctctgtcattatttagatagagacacatttgttcgggctgacaagagttgaagattgtagttctgcttcttttatctccatgactgggcaggagccatgtttgatcaatgaagctcacagtggcaggaatgaagtttgtaaggtaaacaggggtgggggagaaccctgaatttacctgcatgttgtgactctgtagactcacctcttttattaaagatgccatgtaaagagcagtcagaggagtttgctctgctggtttgacaatcacggtgttcccacagctaagggcagggcctatcttccaaatgaacatgagcaatgggaaattccactggaaagcaaaattgaataattttatattgtctcaagctacagtttctaaaatgacctgtcttgatagaaaactgataagttcggtgtaattacctggcatatctcacttaggtttattgctaaaagcaactagtaaatgataaatgttctgaactaaacatagaagggaataggaaaacacccctgaatctaatcaagtcccattattttgaattcttattctacaaggaaaacattattttatgtttttgtatataattaagcatggcaaatgttacagatagtttaaaaggtataacattctctccttacatctctctaaagaatgcttattgaatttacctaattataatatctcttagtacactgactgtctaggagacttcattttttctttttggatcccagagactgaaatcaggccatggacatattgaatgcaatttccacatgacagagctagcctcagcccaagataaacaatatggttaaaggcaaaggaagttcacataaagtaagcaaatgcttgagtttggatctcagcaaacccactggccacctgtaagaaataagatatgtgactgtttctctctttaatgccattcaccccccatggatggtaaaacagtcctgtctcttttagatgatgtcctcaggattaattgagaaattcagggctgcagcaaagcatgtgtgaggcctagggttagatctccagtacaacagaacaaaacaggggaagttaatgtttaaacttatccaatagtcctagctggaagagtgatgtaggtgattttgagtgttttttaaacctttgaagtactgaagtatttccatgaaatacactgatacattcagtcacactagccaagagtcactgtcattctgaaaaccttacaacacttcactattttttttatttatcttcttaaactatatcagctgtatgtggccagtgccctgtgttaaccttagaggaaatttggttacatccagaacattatttttttggcagaagaattttgagtccccaatcctgctaccctaaatgtataacacaggacataaactattccagttttcatggagcttattcctcccactcaatcaaagacattttccagcacttgaacaatcttgcttcagttactactgtccttagtgggaagtctcaaggagacagacatgctgggagcagtgagcactgctgtgtccactgacatgtcccagcacagaggagttgtaataagcctttgtcacatacttacaaagcacaactcatgaaaccagaacataacacaaatctcaaaataacccatgcagtaaacacttaggggttatttggcaacactaaaacaccctcaaaggtatagcagtagatagaggggatctgcaccagctaactcatatccaagaaacaaagtgacaggaatatattcttcaggcagtcatacttattgaatttacttcatacataaccatcacacaagcttcacttgtgtggggatggcttcagatcaaatggattactgttttcttttccccattggagttacgaaggagaacttacagggatgatttggccacacaccccaattggttcacgtcttgtgtaagtaaaaatatctccatctggaaaacagagtaaagacaccatccattaaaaggaaaatgtgggatgcactcatggcagggtgataggatgtgggtatgaggggagccccacagtgaatagcaaaagggaaacaaaatataatatctacaagattaataacataaacaatgggactatcaaataactatttgaatctaaagactgagaaatactcaatttcttgtattccaagatggctgccttctacatgcacaaaggacctgggaggtgaggtcccatttgggtaagggcagagccacaaacaaatgtttccagcattttgaatctcccaggagcactaacttttaaagataaatgatttaaaatagcaaaatatctccccagagtaagcagtctttctactgacttgaaatatttggttttattttttgactatcaaacgtaaatgcaatgtcttttaatctatgaaaaaaagtgtctgaagtgaaacatggttctcttccatctgggtttggcctactcaagtgccttactttgatgtggttaccctgggaattttgttgttctgtgttttattttggcttcctttacaggtgcctctgctattgcagcaagtactgttcctggcaagaactatgagtatgttaagcagcttcttttatgtttcctaagagtggtgtaagagccacaaaaagcccatttatggtatctctgttgtctcattcttatcgtcttagttcctgaagactagtgagattggaaatgagtgttggtgtcagaactggaagtggactacttgagttcctgaagtcattccagttatagattcttttctagttattgattctttttcacttgaaatattttttaagtgtctattctactatgtgcatactgagtaatacttgcacaaacacttccatgcaaatcttttaactcagcttgtaaatatgttgttttgtgtgttttgaaacatgttaatataaattagtttgttttaaatatactgagcttaaaagggcacagacagcataccttcctctttctggaccaaatatcttaaaaaattgtattttaggaagaatgtcaatgttgttatggaaatgaaacacaaataagtgattttagtggccagttttgaaaagttcgaacatttggacatctcaatgatacctaattgagtctatgaaaatgctttaatgctgtctacactctccatagttatattttcttcatgattaatgggtacagcctaaaaaaaatgttgactcaatagaacttcctttttcagaaatgtctttattcaaagtcaatggaaaaattgtttttgccttattgtttgacatctttatcagcattttaaagtgtcatctctgtaatggtagccggtagccttgcctctgccaacatccctgccagttttctaagtacacttaccacttggtattgtttgaccatggaccttgtctgcccagcctgcacagtacttcaatgctttgatgcagcctcctaaatcaaacaggtatgaactggcaaagactttcccaccattgattgcctccaatgtctgaaaacgaacacaaaccacagtctacaattgcaacaagatattagattaagaacattgttcagcagaactggagagatggttcagtggttaagattgtcaattgctgttccagaagacccagttcgatcccagcacccacatcttacaatagcttacaatcatctataatcccagtgacttgtgatattatgcctccttctgccctctgagtgcagcaatcctgtacttagtgcacagacacacataagggacaaatacccatacagagaaaataatgtaaattaaaaatgaacaaccatatactcatgtatgaataagcagcataatctgattcagaaaagtaaaaagaggatgtaaaaagtaggtagtaggtggtatgggtggccctaaggggagttgataggaagtagttgtggatggatatgatcaatatgtattttataaatgtatggaatattataaaaataaattagaagaataaatgatcgacattttcagtagttatgtcagagagctttgtaattatatggaatctcaaatcatctcaactaaactgttttttactctcacagcctagacacacgggggaggccctaggccctgccccaaatgatgtgacagactgtgatcatcccccatggaaggtaggtgtggggcatgggaggatgggagggagagggaactgggattgatatatagaataagattgtttataatttaaataaaaattaaaacagagtccaataacttgtttatggtcacatagcaagctcctggtagagaggataatgagattcctgtcatctgacccttgtgctctttctgtcacactctgagttccttccaactaaactatgtctacacactaggcacagtttcacaggtacacaactgtgaaaatgactggtagtctccttgccatataagaattccaataggatctctcttgccagccaacggtagagacaaggtgtttgcatccattcttgatgcctaagtaattattgtcatattcttcacagatagaaagtctgttggaccaaatatgacacttaatctttcaccatggatttatggattttcctcagcacttttcaatggcaatcctgccatttggaaacatactcataactacttcaatagtcaaactataaagttccaggctttctggtattgttgtgttttctctttcatctcttttcattcagactataaaggtctccttggaatcctacattccatgagatgatcattcaatagctaaagctcttcttcctccgattcatattgtccacttcccccagaatctacacccatgtgattttgggtatctcttcttcattctcttcagccttccaaggtaacagacgtagttaacagtttgcatgccaccaacaaatgggagaagtcacattttggaaaatagcttcctttctatagactactgagggcagtatgactattcttttcatattttgaaaaattcagcatcattgaggaaagggttaattttacaaaacattggtaatgcttccagtaaaatgaaaataattaaacatagtctgatatctaactgggagccatgttattttcagttggctttactaaaattcatgacccagaggacaagtaaatgtgctcccattcatattttataccgacatatttaccacagaaatgaaaaaacatagcacccaaaagagaagtctgattgtattcaatattcaacctggatcctagtttgttaattcctttacacctgtcaaaatgaaaattacttctctttgttacaacattgtcaacagacatgtggcaagagaaagatgcattacataaatgtttgggtagatataaataaaattttttctagcaatattttggcacttttagcaaattcacaaatttccccataaaatacttcaggttcagtgaatatgagaaatcaagggcattgttagaggaacatttgaccatagcaaggactgaaaaattctagagaaaaagtcgatgtgctgctctcttaggcaaaccagctggctaactggagcagtgagtgctcttgggaactctcctatgcatcctgttgttggcattggttaatactcacagccagcaggaggcggtctctctccattaagtcagccagcttgaacagtagacgccctctttctgaagcatccatggtgcgccatggggagccaatctgaaaagcctgccttgcagccttcacggctttgtcaacatccgcctagaaatcacagaacacacagttcaggatattcaaaatactagataagcaaaaacaacatcataaccttgtaaactaggacatagtcctcacaaacagaagctagatcttcattagcccaaagtccagaatattctacattctacataccatagtatgctggaatggttactcttgagtaatatttgtaataagctccaatagtctatcaaatagttaaactcctacaatagacatggttttttgtttgtttgtttgtttttattttgttgttgttgtttttcaagacagggtttctctgtggctttggaggctgtcctggaactagatcttgcagaccaggctggtctcgaactcacagagatctgcctgcctctgcctcctgagtgctggaaataaaggcatatgccaacactgcctgactcataaattaatattttaaatgtaattaattttcagttttgtctgcaagactggtattatatggaacttcataaatcctataggctagtggattgcatctttatttaggagagtgaattctcaggaaggagattccctcctatagttttaaattgcttacatttagctgaagcccagttttgccttcactttagagaggcatggaagaccatattaatatcacctacctcagaaactgttccataaggcatcgaagacttatatgtctgcaaactgaaatggtaataaaccatgtcatggtacagatgttcctgcatttatgagagctacaaattgaaatttccatatgctaaatgcattaagtgcacatgacaccacaaacatcacagcttaacttaaactacctaatatggacagtcttccttaacaagtattgaatgtgtcattttgtggatgctgtggattacagaattgatggcctacccacagggctgtgtgactgttggggagtcccacaaacatcctatttaatatatatattgttttcttatgcctggcccacagagctagttccaggacagccagggctaccagagaaaccctgtatcaaaaaacaaaaacaagaaaacaaacaaaaaaaccctaaaagatttacaaagtttgtaaaatatcaaccgaacttatataaatcaaagaccctctgtatttatgagtggggcaggaagaatctttttagaagtatatcttggtttgaacaatttcatgtttaaagttacccacaaatatcctttcactgtactactttacacaatagtgtcaaatcttttgaagagtaatgagtatgtggaattaaatatatataactatttctttgttgcattgagaacaatgtgtattttaggtatcatgttgaccatatcattgattatatttggacttcatttggttttacaacatattttctaaattttccctaaggaaatccagagagcagtgtttggagaagaagaaaaagcaaacctcaaaaatctgagttttcccttgtgatcactggatactttaaaacacacttgggtacacacatacccctctgtgttagatagacccatgagaagcagctgttgtgtggattcttctgctttgtgttatgtcattggcctttgccaaatatgagctgtcttgagcctcctcccttgccctaagagcagatagaaaatggttttgaaacaaaccttgacatttgagaaagcttcctactaaaagatggcatagacaagcccggctttggtggctcacgcctttaatcccagcacttgggaggcagaggcagatgtatctcaatgagtttgagtccattctggtctccagagctagtgccaggataggctccaaagctacacatagaaatcctgtcttggggggaaaaaatggcatggacggctgcctgacaaagttccagtattttgacattgcataacatgcttttgcagcacctttttactttcatttttaatggttctcagtactaatgcttttccctttggggaaattttgtatggactttgtcaaaggatgaaaatgtgtacaatggtagcttcactaaacaaaagaattctttggaaaaaaatctctgccactgtggaaccaggaacaatcctcctatttataccaagaacaggaatgttggagatttcctacacacacctgatcccaaagatgaaatgcctacaattcagattccgagcctgaggccattaggggcaaacatttatttaataaatacagagaaatcagaatggtactgtataatgggagaagagtaagacaccaggaccttcccttttaggaatgttatgaggggaacaggaccatatagtgagactaagaaattgtaatatagtgtctactcctcataaatccttttcttaggtcaggatttggataagagtcttcattccctggagtgcttgaggaaagtccctgctttatagagcagtcattcttatctctagcaagaggaatttgtggcctttccattaacatgtgactgttgcctattgtcaaggtcaatgctagattcctctacccttgatctcaagccataccccagatcacttgtcctttgtctcccattaaatcctttgtgcaactgtacagtataaaaggtatgatcttttctcaattagatgttgctggcagtcaacctgactcaccctcacactgtgtccatttcctccttctccacactacccccatgctgactacacacatccttgttggtacctgaaccctgcctgccaaagcaggtctctggcattgagctatcataaataaatttgttcttatgtttatatcttttggggccatgactctccttctctcacattatgtatagaaacttgcaggaccagaaaaaagagtaaggaccatgaatttttagtgaaacccaaagcccagctttgaattctgatttttttcttttacccaggtaagatttaagggatgcaaacatctgtgtgcctttatagcattctaactgtaggtaggctaatgatagaacagtgaggtcaagagtttgttctgaaacaattgctaaactggaggaacacacaacaaaacactactttatcgtatggcaaatacagcccttcccacagtattcaagaagaactgattcccaagttctggaatgataatcaaaaatcatatatgctaaatttacataaaatgtgcatataacccacagacctttcaggttaactctagtttacttcccatacataaaacaatagtaggtaaatattatagtatggtattatactctactatttagagaataatgacttaaaaagcctgtgaactcaatgttcacacagctgtgatacactgtatcatgttgtctatgtcagcagctccaccttctggtcccagggtgataaatttaccaacatgaaactcggtgcagatggtccactctgtcctaaagtaagatacattgtttgaagttcactcctcttattcaggaacagttgtctcacattttctatgtgacagaaaactaagtgttcactagatagagacaactgtggtcctaaaagagagtccagcaggaaagtgatgacagtatcctagtacattctagcatgttctttaagctttctctgccctcttctacataggctctgttgttgcatactgtcagcagcctcccactttccttcatactgtctctataaggctcccaggctaatatccttcatgtaattaatcttatcacgtgcccactcatgttacacttgcttgcttcatccccaatcctaagggcaaggctttctgattggtttcaaggtccaacatttcctggctccacctgctaaggaagacttcctgattacctttcacctgcttggcatgagccatcccttctcacctcagctcctgaaattctcctttaatagagaatgttgtagcagcatgaccttttactttcaaagtcccacacattttcaaaaagtcctggatcagtgtgttaatataccacaatagtcacagacacatcgctcaaggacacttagtaattaagagcctattactgatctccaggaaggaaagcaagttctttattgccagaagttattactatagatagttatcatgaacttttctacttatgatagcaaggcaatggtagcaagttaaatatctgtcaatagataaatggaaatgtggttcacatagaaaaatagaatattatttagccataaagaaaaatgaaatcatgaaatatacaggaaaatgaatgaacttaatatgtataatattaagcaaggtcactcaagctcagaaaaagaatcgaaagttcttcctcatgtgaagatcctaaactataatgtttatatgtggacagttgagtgtgtatagcataactcgtataaaggtgatgaagaaatagttgtagcagtgaatgagacagcagagaacacaggcaaaaggacacttggattgtgagagaggttaaaagctcactcattttctttgtttcaactctgtcatcgtcttttgtgttgggtaagtctacaaaaacatagttggtagtgaaagagtggaacacctagtgaagttctgtgccttcacaatggtccttctaactgtgaagaagctcagggagaggcacagtgagtttgggactaggcaagtttctgttagagcagctttcttcctcaggttgtgtgatggttttctttgtgagttcatttccataaagtgatttaagagagaggctttaggctcccagcacaaggccatatctttatagttccgaagttactagcataattatcatggaccttgttttgtaggtaattagactttacacatgtgacccacagcagaaagtagagccaaaatttgatcttatatatgacctttgtaattcttgtaggtcagccaggctgtctaacaaagctgctttgggtagcatagtcactgctcaatgtattacagaatacaaggttccttgctaatcttttaatacacatccaatatttaatcattttttaggtttattataaatctaacatgatatgctactatcatacaaaggcatgcattttgccttatttaacttatttttagacatttctataataatcatagtttaactgacttcattacataacaaaacttttgcattactcaatatattaatcacaaaagggttttcaatacgttttacttctttttgtatgtttttatttaagggctggcatttccaagatacatgtgtattaaatatacatctttaactagacaacaagattagttgagattttctatgatcaaaccctgtggcctagagaaagtaaaatattccagttttgaagtcagagcctgcaggctgaatgtatgtaggcactttgaacgaacctgagacaacaagagccactaagactagttgcagggggggggtgtccgaatcttccatctctcctggaatgtataccctcacattaagttcattcgtagatggagaaaatagcaatcagaccagtttcctttcacacctgtctgaagcatttactttaatggacatttagttttatccctctaattatcgattagctcacgccccaggattagtcagcaggtcctaaaggagccagtgaagtgaaaagaaaacacttcccaccctctttgattcttaacaagcatttgctctggcccgcgcaccacacttgtgataccatgaaaggcagggtagggccggctggcagccccattctgtttgtgaatggaatcttcaaaacctttagcctttgacccaaggaagcagtccagcatatcgggtttcctgtgactgtgaactttaccaggttatgctagagtaactaagcaatgctagtcactcttcattagattcctcacaaactgtttgaacagaaataatgatgaaaagacaatttttaaagaatttttttttttttaaagaggaaacggagacaggaatgcggttttgaagcaagcccttgtttatcacaaatagtttgtatcactgacaattgccttagaggactcttttgtccaaccaggttggcacagtgtcttgacttgcagcttgcctgggtatgaatcagtttccttgatttttctatgggagggccagttgtcactaagcacagagaagatcagtgctccctggcaaggctgctgggctggacaccagctttcccttctgtgcctgaggaagaaggaaaacctcactgcttcccccagcaaagtcctcagcctgcctgacaaggtttccactgaacccaggcagagtttgtcttcctaatgggatcaatcccagtgtcagaacaagatgtcacctaggagctaaatattcaaggcttcagtgttaaagcagcaacaatattacttcttattaactgtcatttgtagattcatagtctcaagtgtcatttttatctacacggagaaggtattagcaatgaatgagctcttagtttgtgtatatctatgtcttaccacatgcgagtcttattttttgtttttttccttcccagtcttgttggagatactcaatgagtgatggtggcatttgaggtaaagccatactgtgtatatcttagcctcaggaaaaaagcatttattcctccttgacttaatgtagtaaacatattttcacttccttctggggttagctcagagccttctgggtttcctgtggcacagccatgaatggtaattatctctctgcctaagttttgctttctagaagttcatgaagacacacccctggataagacaatggtgccaatcatcctatctttagcccaaacccatatttcccattatgccctgaagccatgtccataaacgtatcacagtgtacactggagaagaaccagcctctttcttatggagatgctggaaaattacatgaagaagagctactacagagcctcctctttctcaataaatagaaattaactcaaatggatgtatgacccaaaggaaaaatacagaatgatgatattactgaagaaaagtgggcaaaatgatttcaagatattgggttagacagtgactgtttggagaagttgccaaagcacagctgttaaaacaaacatacatacaaattaataaattaatctgtgtagtgttgagtcatagttttacagaagaaatgtgtgaaacaggcagcctgtaggaggaaagcttagactgctcatctgacaaatattttgttgtcagatgttataagggactaatatcaataaacattttctaaacaatctaatttaagtggaaattatgtcagaaaggattgcttctgataagtaaatagacatcaagaacatggaactatgtccacttggcagctattggacaaactctacacgaaatgtaatcgactgatattctcttactctattcacaatgattcttaacaaaaatcaaaacataaaaaatactgttgggattatgggaaaaagaaatccttgcctactctagtgggaatatgattttgccattatgcagtacagtatgaaaatccctgatctccttgttcccatatcaattattttcaataaaataacttgatagtatatggttcaatctttagcttcacttagctaatataaaagaacagatgtaagtttataaaaagatttctctctctagcctaagaggaatttcttcctatgagtctgtctacgtaataaacctagacactatttcaattgaaaagcagtcaaggaaaaatagattgaaaaatatcagcaccttacctaaggcatccattgatggtgtttgtcttatgccaaggacaacagaacattgacccagctaccagagcaaccgtgatttcgtgtctctcattgcacttccactgggttttgagctcagaacagtgagaagcaaagactcctggtataaattggacttgtgcgtgttggaacttaccttgtccccttcttccacatggcagatgacctcctcagttgcagggttaatgacaggaaatttcttgccactcactgagtcatgccattcattgtttatgaagatctgtggagatacagagaaagcaggtaaacacacttaaatgtgcagtaagtttgagcctttttaaactagagatgaagtacagtatgatgcctccatgctgtacatctctccttgtctaacaatgcccatcatttgtttcattaacatgtaatatacatacattcaaacatttgtacatacagagttaaagaaagaaagaaacaaaaaacaggtggtttttcattttgacctttggtcccacagtccctgagctcaatccatgcatcccctccacttcatgcttgcttgagtcaccaagtcctcctctgctcctctgctccagtttcctttataagtttctcagctagagcccaaaccattttcatgttttacttctaactaagcagcatttcctcataacctgtttactagttgctccacctaaatgtaatttcttttgttccaaattagtgtgttctactatgtcaaagttagacatccacaacctatgagatggtaaaccagcctggacattataatcagccctgaaaattatcatgaaattcactcaccaccaacaattcttatttcttctgtaggaattgcactatacctcagattttctataaataaaccaagaaatcaaatgtctcctaatatgtagatagactcataacctcaccctacccagtttgaaaattggaatttcacttagaaatagagggaaagtcccatactaaactgattccatgttgttatgctattgtgagactggctagtgctcgcttaagtcctcagatccttagctctgtgggttctgagtggtatccctgccatagatgacttctttcttttggtgagctatggcaaagtgtacacatcattttaatattagaatcatgtgcctaaactgtacactgtcccttcatactaaaggcagtagatgattcagaataatactgaagtttatctggtaggcttcagatagctgaagagataggcttgaataaccctgtgagtgcccatgactcagcattatacagatttaacctttaataccaaagaaaactaggaatccagtgtttatttagtttaatttatgtaaccaaatcctgaatggctgttttaaatttttttattgagttgttgcctttgccaatttcatgcaagtacaaagtgcactttgattagtgcaaccgaatgcttctctcatctttcaacacttccaatagtcctcccaacctctcatttgtttacttgtttcaaatctgaatttaactaggattattttggtgcccatggatttaaaactatccaaaaggagcacggtgggctcaccattggatatacaagtgaaaatgatgactgtcccatccccagaatccatcagttgtcaaaagttcaccaggaaggcacagggacatgtaaacccctccctgatccatgaatgctcatagccccagtctcatattgtttcactgtagacagccataggtgtgtttggatcatgacaacgctgtatatgccatgcaaaactgatcacatttatgatcagaaaaaatgttttgtcaaataatgaccatggaagatactgtgagaaaatgagaaatatattaagtgtagctttgctcctgaaggttcatactctaggaagagtggatttctaatcaatatcaaccagtaaactgaagattcaaagagccaaagtagcaattctttcaataaatttcatggcaagacttgtgggagaaagggatgtgggattaggtgaaagaagacaaatgatgagcaaagcatggaccaatcttgagatacttacaacccagcagagacaccactagaatcaagttgaaatgaagtcaacatctagtggactctgatgaccgtgatcactagcttctagaccaaaaagaatgcttgaataattaatgaaaattgccaaaactgacattaactggagcaagcagatctacaggattttcccagagaccttgtcagcaagccaacaatgaggtcacaaggctagaaagaaaatagctgtatcatccacacagtaggactcagtaatctgccagtgatggattacatttattctacataagacttttcagtactaagacagaactcaacacagtctatatgattactaatgtatccctaatggctcaggcttgcaacaacttttccttcctcttacttattagttacagtgaatttattggtattttctccttcttctcccccttcttagttgtcttagacttacatttttattggcttctagctacttgtaagaacaaatatatttgaataaccaccctccctataattatattaaatggatatatggataaatttagtttaatgaatgtttattatagtaattattaaaccatctgggactactgaatgttctatcatggagagaagtatactttccaattgttgtttgttgttgacaagtttgggagacagggatgatattataaaataaaatattttgtgcatttaatcattaactgtattataattatgaatgcactcgtagtgctttagagtattgtatatgtacaagagatattaagtctaagttcacagaaatcagttttaaagatgtcagttgcaatcctggaatttcaaggttttttattttagtatatttttaaactgatgaaacaatcaataataattttttaggtaactaaaacttgacttctattttttgtactttccatagatgaaattaaaaatgatgtgcatactatcttcctatttaccggatgtagtatagtttctcaactcataattattaggaaaaatgatgcctattcacagtcaaagttattaagtcttcatgttttcaatgaaaaacaattctaactaagaaatctctacactctggtatatctccagatcatataaacctttctcctttaccaaatatgaaatttcttctaaatatttctgatttacatcaaaatgagttttattaatggacatagtaagtgcattctcttcttctcttcgtacctgttgatatgagatttggtggcctattggctcttaactccctgcgatgaagtgccctgaattcaaatgatttttacacattggcaacagggcaattagctcaggtccttataatggaagtcaatgttttcttagttgctgtgaatctataaaaatcaaattttcaatgtacaaagaattataagattttctaaggaagagaaacgctacagtcaatcctcactctagatcacctgtgtatcttgccaaatatgaaaggcagggacacagtatggagagtgatgagttgtgatatcaacgtgtagggaatggtaaatattattatgtgtacatttttttcatcgttagaaacctgaaaacataccaagactatgagaaatgttgaaaataagatgacgaaaagcacggtacaatgaacaatatgagaatggaacatgttaagtggatcttaaacattaaaaaaaacggggcgggagggggggctagatttctcacaactagttctaacttaagcctggagcagcaaagcaaatcttgtgattcaaacttgagatgggaaaataccatatggtaggaaactatctacagtcaagtgggtggaaacaaagttagagtagccaacacaaatggggagaaatgcagacttcctactagatagttcataaactctagacttcatttcatgtaccccatcaaaaaggaactaaactagagaatagttctacatgtatcaataagtttggttagagcagaaatactcttgagattaagattatgcagctgtttgactatagctgcaattctctttttattacttgcattataatttcctccctcaaccccaaaaccaacctgctttagacaataataaagaaaaataacagtagggaaaacaatacataaattgaaacactggtcagaaaaggtaatttgacaaatacctctaacctgacttttatgctttgcaaccaggagctaaaatccattgtctcaaccctttctcgggagtgggaatctaatacaaatcttcagtgggacacagtaaacagaacatgcacaggcatagagaaagctccccattgagatttaattgcatacataactggtgtcctcccaagtgtgaaaatgctgtaaccagcacatcaaacggtataatgcttactgagtaggccagatttatgtagaaaatacacggaagaatcaaaattgactgagtggtgttgcatgttattaactagagaagcaagtgaatacccagcaaacatgtttttgattcttaaattcttaggtccattccttttccctcagatgtccttatgccatgtgtttgcagtgaagaggtttcagtctggaaacatctgtgttaacatcctgtccttgtatttgggactttaaggaataccccattattctagtactttcatttgcatgctttacaagtactaaataaatgtaacgcagtgggaaaatagttgacttaaaacacttcctacacacacacacacacacacacacacacacacacacacacaaccacagccaagttaataggacaaataaagtaaagaatgatgagggcaatatcccaactatcaaaatccattctaagctgggatcgtgcaaactaaactcttcatagtgattaaactataattatataaacagagtcaataattccaatctttttgaaacactaggtgtacagaatttcttccaaacaccagaaagtgagtgagagaaggagattgaccgttgtgagtgaggggttggagcttgtggactcaccagagtttgcatctacaaatttgcaaaaaaataataaatagaaagaaagagagaaagaaagaaggaaagaaagaaagaaagaaagaaagaaagaaagaaagaaagaacaacctaaattgaaagtcactttctttcttttgaaagtttgtgaaattgggctagtgtattgttagctgctcctcagccattaccaaggctcactcctctctgcagactttgggctaagagcacatgtaacaccacacttgatgtgcttagcaaagtgcaaaaggcttcagtgtttcaaaaccacccaattcttgcaaaaggagataaatgcacaaacggcttgggcccttgtcatctcttttaatcctcttggtttccactgcgtatgtcagaagtctgaacagttcatctctttatgctttgaatcataccacacagctaattttcagtggcttatcgtgtgtgtggtgtgtgtgtgtgtgtgtgtgtgtgtgtgtgtgtgtgtgtgtgtgtgtgtgtgtgtgtgatttatttcttaatctgggaaacctaggacccgaaacaaaagtggacataaaactatgtggtaggaaaaatgcagagagtttctcaagacagccacagcctgatcattttctaactctccctcttgtttctccaaatatttatcagctaacaatcacatgtgttctccaacagtctccaacaataacaaacttccctggagaaatagataagcacagtttttatgtcaaaataagcaaataatgaaagtccatttggggattttggcaacagctttcattcgttgctcagacttagtcctccaactccaacactgtgttatgaaacatatggtcatgttatcctgttttatcctgctatttctcctttagaaagaaagggagaaggaagaaaggaaggaaggagggagggaaggaaggagagaaaaagctgttttcatatgtttgactccttccagtaagttcctctgtttgtctgccttaccctaagtgctcagtacacaggattaagagacctgctgctcactctgcttcactgcactctggcacaagaacctttcatacagagtgaaattcttttccctggaacacatttcaagctagaaaacttacgagaagttgtctggtatggtttaggattcattgctgaatcaccccactaactttgcaagcattttaattttatgtttgcagaaagctcttacagaagccacaatcgacataggctttaatcaggcctccagggagagccctgcttgcaagtgtcttaccttggtatattgaatcttcaagttggccagcggggcagggacttcaggttgagacattgctggtttagctcctggaacacaggtgacaggctcagcaatttggttctgatagagcccttgctcctttttatctgcatgcacgaagggtcatttgcatattggatatgattggatggacagactcagggcagggcagaaaggacactactgtcttctaataccttgggctgggagcctttgcctttaaatgtaaatccttaaggaacctgcacctcagctctgaagttccatctggagactgctcactatttacagatgaattagtttacaaagccaaacctgtgctgagggtgtgtgtgtgcagctggaagccagttatggtttttttttttttttttttttcttgcctgttcatgctttgttatactactatgtaacccttccttctctaacaggctcagaattaaagattttacaaggaagaagaacctaaaacaccctctgttctcaccagaatctggggagcagaggaccatgaatcttcaggacatggctacgaacaaatccattcttgtcccagatcagggtgctgttagggagaaacacctccttctctagactctgtcttccacagtttaagaaactcagccacctcatgtgatctcagaatcctcaaactggctatgtcttttggttgggaacaaaaaactgtggtccctgtcactcacagatcctcaaaacatcatgtccatgtcatctgtgaaaattcatttcaagaggaagaatgtctgattgggacacatctacgcttataaatcattactctaaacagtgtagccggaaaagaaagtaaatatctctccctaagagtttaaactctgaatgtttcgagcctggaactttgtaaaggacaattttgaccttgggagttttcatttggaacacaatgcttctctgtgttgacactgcagcacaagatatggaggaagaaggtaacattccttggatgccccagttcctaagaattagcagtaacttctttgtagtaaagttgccatctcccctcccctgtatggggattgcacgaggggtaggaacaggagtttgggaacctgtttctcttttcaccctgaccccagcttctcattttataaacacagagaggaacacagcttgtaatcatagacctcacagtataaggctgaaatctcactcaaggcaaagcttcctcagttattcttgttatccctcctttctagctcggccttgatatctgtaagatgatccccacaaaagatcaaggtgagattgggatctccgcagaggtagttacatacaccgaaattatgtttaaccttttattcatcctagcagggataggcaaactttttctcatggaacagagagaaaatactttcatcttcctgggacttaacagttctgtttttatgtgttctatgcttattaaaatttacaacagacaataggcaaataaatgcactttaaaaaaatggaattgtgtatgtaaaaataggaggcaagccagatgcacaacactgagcatttccctagattcagtagtgtttggatagcctgctcatcttgtttgaatctgcattggaacgtcagtgttttctaaatattatctatctatcatctatctctcccctgtctctctccctctctcatctctttctctctttcttcctctctctccctccctctctctctccctccctctctctcccctctctcttctgtctccctcttctctctcttctctcccccatctcctctcttgtctccctccccctctcctttctctccctgtcttctctcctcctctcctctctcttctctccatcaccctctcttctctccctctatcttctctcctccttctcccttctctccctctcccctatctcttcctcccctttctcctctttccctctccctttctctcctctctctaccgtctctcttctctctctcctctctccctctctcaccaccctctctctctcttcctctctcactctccttccctccctccctccttccttccccctttctcatttttttttgaaaaactgaactgttttctctttcattaatgtttctggatttaaatgcacaattgctcaatagctgttatataacacacagagtggtgctgaggccaatgcccaaacagctgtgttttgcagagtcacagttgtttgtagattcaaaactggttcatttggtgtctagaagggaaaaagcacaggctgcacaacatacttgacataccattcactttactctctgaatgggcaacatcattcattgtattttcttggataattacataataacaagctcttcaaatccaccattgtgtgtgtaactaaaggacactttggagacagttaccatgcctgcccatttagcttctcaagtatttattaaacaggtatatgcaccagccattcttcagtcttcaaaaaatatcagctgagctcctcttattttctggaaaccacaagtctgatagatgtattttggaagtttaatatttagaaaagcttattcctcagaatagataagcaagtaaaagaactttttctcccccctctttcccttacaggggaaaaactagctttgttatgatgatgagcaccaagtaggcctacttcttgactggagtcacagttgggtattttcaacatataccagagctagcaatttaacatgggttcctcaatagagaatatttccttctctatgacaagctaaattgctctatcgtatccacctacacaaagccagggagagtaaaaaagaaattgagatagtagtgtgattgcctcctgatcttcacatggctttttttggggggggggagtggttttagattcacatttaaactaaaattatgtgcaagtgtgggagggagggagggaggtatgtgtacatgaacacaggaacctgttggagatcagaaaagagtgagagatctctcagtgctggagattcaggtggttgtgagttgcctgacatgggagctaggaatagagatcatgtgctttgtaagaggagtgtgcactgttagccaatgagccatctctcaagcagatgaagtctgttctttccccaagaaatgtataaactgcaacatcttctatcaccaaaaccaatctcaatagactatacatttgttcttggctccattcaagaaagaaccttctactaatatgaataattcacattaaaataagattaaataacaaaagtgaacttcatggtgaggtgaaagtttccacaatagattgaaagtttgttcccctcaaaatgcacacactggaatcttaacccagtgacaaagtgtgaggaattggtgacttggggataagtggtccatgaaggggaagccatttgtggtgataggaatgatcccagagcctcatgcattctgagtgaggactctatcaataaaatacaacccctgcttctcctgctgacttctttaatgtgaaaatctaaagagaattcaggagtctgctacccagaaagaagttagtgctcatactgcttgacagtgccaaactttgatagaggacttctggcctccagaccttggagaaatatttttgtttgtttgtttacaaggaaattatgtttcagaattttgttgtagtacctaaaaaagtgtaggatgactttttttcccttctcacattgtctaatttcaagatccaggatggttcatgtgagttcagagtcttgctcagatagtttgtgaggctcatgtctcactcctagaaccactgctttcttcccatagtaggtatgccttcacattttggtgaatataattttgtctgatacaatatcattctggttcatattgagtgtttaggtttaaataattataagaagtagtccttgcttgtgcataattgataagttgatgctaacaagcctgtattaaattaaatgcacttgtgggataaattctattcacttactattctccatttagacatatttcatcacctctcatttctcttgttcctcacgtatcatatctttgcttttctgtttatttcatgcaactaagatatggcctggatctccagcatctgatgcaattgggacacttactgcatagtaagttctctaaaattaactgtggattaaagactatataagataattgtgtgatcttaaaaacatttttgctaaaccttatgggccatgctagccaagatccagaagatgatattggcccatgaagtttagcttgccaacacagcactcagtattttgtctacactttccaccattgttcctaacagtagagagagaaaataaaaacactggaaacacttgtgaggtctctacggcttccctgttccatgtttcccacatttgtgttatggatagattacccttcaacatgttcatcatgttactagaaataattccccatacccacttttacactcataaacttaaattacatttcttcagtgttataataaatctttctgccaaaagccggggaaccccaccaccacaggtgcgctctacgccagccacctgcctgagttagggccccaattaatgcacagagagacttgtattaggtacaatgctacttggccaatgactaggatttctcatctgttagttcagtcttaattatcataaacctatatattttataagacttatagagatgcctttcactggcaccctctcttactggtggctcacacagcaccgctggaggaggaaggggaaaaaggggacacttcctgtttcctttgcttaaatatgagtctccttgctatgtcacttcctgcctggatcaccacttctctactatatttcccagaatcctctttgactcctagtcctgtctaacttgctgtttttggccaaacagtattttattcaataatcagtaagataaacatacaaagaagtacattccccatcacttcagtcatttgaatgaagtagtgacagcaagtgttgtcaggcttggtgctgagccctgggaaacagcattgagtcagaactgagattacaagacatggtaggaatggtggtcttgctcctcctttatgattttccaaagtatatactacttaaacacaccatttatagagtccttaaaaactatgaggatacagctcaatacgtaactataaaatgaaaaaagaaaataaccacaatgtgaacaaagaatcctcgatgaacttcacaacttgctgggccctcactaggaatcaccagtccttttctactctctcaaagtatctctactccagcatgaacccaatcattgcatgttgacaaagcaatctgaatgcagcattactcaatgctatgctggagcaaggttttcccactaagcaataatccatgctatcatacatttcaaaggtcatacaatcagcttcctaccccttcctctcacaaagtgatttgtcattgtgatgcctgatcactgaaggactcaccctcagctttgtggtccacaatgccagcaattgaaatcaccagttgcctaattcttgactctgaaacaaagattgttcaaggaaagctgaaagcttcttagtattgaatgattttaagagggcaaacaatgattttatgtgcacacagatatggctataggcataaactatcacattacactaaacagaaagtatcctattagctgtcatttcatcatttacataagtatcgcttacctttctcatgctatgacagaatccctgacagaagcacctggaggaagaagggcttattttgactccagtttccttcacattcaggaagcagagcatggtgaatgctgcttctctgcctctacctcctttatccctgtctcccaaccccccaactctgggtacccagcccttggaacattgccacccatgttcagggtggttttctcacctcaaatagtctaatttaggaatgttcacacaggcatgccccaagatttgtttgcatgttattttcaaattttctttggttgacaatcagattaattgatgtactatgtacaatattttaagattttagtgtgggaaaacttatattagtacttaatttggtcttcctagatgtataattgaatcctgatcatagaaaacacatacttaaccattttgagggtatgaagtccacagaattcattcactagagatctgaaaagacaggcccatcagctcaaactgtttacaactggaaggatacaataataaacaacttcactcctctattactcagccccgtattttcttcatttgcttggtgtgtcccagaaccccagctgctgattcaaattgggatactacctacttgagccagaattttgagctactaatgggttgggaacacatcacttgcagtggtgttatcaacatatgcaaacagtgtactaagatttaacgtaattatgttggacatattcatgatatctgcatttatgtcattagttttaaagtgtctttttgtgattgaaactgtgtggggcaaagctttaatctgcctctagaattttttaaaataattccacttgcaaatctgtggtagtctcaggtttatttttacgtttttaacttacttttcactaagattattattacgattactatatcaatatttattactatgcttgatttaaatgtaaatatggatgtggatataaatgtcttagagttatttttgaattaaaattatgccattaatagacagggcttaatgtctttctactggttttttccctgtactagcctctttgaaaaaaataaatctgttttccaaggtcctttccttcttaggcctgaaatacaaacatttaaaagtccattctaaaatttgtgactaaagtaaaatgagaagaaagaaaaacatgccattttcaaattaattttttcatgactgcttagagggttacagtaggtaccaggtagacagtaaacttggttggcttcattgcatagttagtataaattagattcagaagtaaacacatgaccccaaagaattaagagcagcagcaggtcagggcaggtataccaggcttcttcttgctttaagttgccttgtggaccaagtgagaaatcaatgatttcttaaaaaggtagcttctctgtgcttattattgcaatcatacttaaattattgatgaatatttaatgaacagctttggaaagagaaattagaaatatttccaggattatgaacatgttctgtttatgttttaaatgtctcagtatgtgtgttctaatatacgcatttttttgttaaatgaatgttctctaagttttgtaaagaaaaatgagacaggaaataacaataaaatgagacttatataaataaataaataaataacaagacttatataactatagatataagaaaaatatttgataaagaggtttaaaagagaaaaaagaaaattttcttgatgagaaaggactttagattgtaatttagttttgttctaaaagtaaatgattgtctcaaaatggaaatagcagagaaggcaaaactagaaggttaacatatgtcatatgaagatttgtaaaagttaaacccgaaagaaagatggtgtggatatgactgagttggatgtaatgaaaggttattcaaaattcctaaggccaaaattcaacacactggggtaggactgaagcctaactctgtttacaacaagtttcttaaagcactgatctaatcttagcaatgtttacagaataactttcttgaagaacaaggatttaatgtctcatctctttaccaaatgggcatttaaaccacagtgattggcttttatccaagtgcagactgtttgattttccactggttagagctgccagcctatcagcaagaaagtttgtattagaaagaattatttctacatggggcatttcttaagattatataataatcatgaaacttattttagtagctaaatattaatttattatattgtcattgacaatttatatgtataatacatcctgattatgattttctatacccccaccgtcatatccacccaaccccatgccttttctttctctctttagaataaaaacaggcaaacaaaaaaataaaagaaaaagaaaaaagaacagaagaaacacagcacatacacatacacacaaataaaactaaaaaaaaaagaaaactataacaaagtagcaaaagcccaaaagacaaacaaacaaacaaagcaaaacaacgtgagacagacatctgcaaaagaactactcagttcatgttgcatggccctactgctggagctggggcctgatctgaagtctggtttgtctaccctttgagactccattgtagaaaactaattttccctttgcaggcagttgcgaattgacaatagcttcttggtagggataggagctcatgtccagtcatccctctcagctctgagactcagctctgcaggccctgggcatgctgccacagtctctgagagttcatacatacatcagtcttgtatctagaagacacttttccttgttgctatctatactctctggctcttacaatctttctgcctcctcttccacagaacttcctgaaacctgagggaaggggtttgatgaagagatcccatttaggactgaatgttccaaatatttcttactctctgtgtgttatctaataggtggtctttattttagggcccatccactgcaagagaaaacttctctggtgatgagtgagatatgatctataagtatggtaaatatttaaacctgcttctaaaatctgccttttaattctcttgattggtggttaaatgatcaaatattatatgctttttaaaagtaaaaaatgaataaatatgttcctaagtcaaatacaatagcattaattcttctaaatctaagatctgctcccttttagaaaaaaatatgtctatataaaataattactaagtattaggaaaattgaggagggaactgtatgatcaatcttcattaaagggaaccactacacactttaaaaaataactaggcgggcattggtggtgcacgcctttaatcccagcactcggcaggcagaggcaggaggatctctgtgagttcaagtccagcctggtctcccgagccagtgccaggataggctccaaagctacacagagaaactccgtctagaaaaaccaaaaaaaaaaaaaaatccaaaaaaaaacaactaaaaattcagatttgattatagaatttttctataatgatctcctgggaaagcacacaaacaaacatgtagggagaaaacctgatgaggtaccgctgacaaggcccggtcagtggtacctctaatcagggtttctccctacacaaacaacctaacctcaacaacaacaacaacaaaatgaataaaaaacaacaaaaagcccttccaacaacaaaactaaaggaattagtactaaaaccaggtgtgttgcaattagaaaagaaactgaatcaatgcctttcagcttcagtataaagaattctaccagatattttaaagaagtttctggactatgaaacttcactggataaaccagtaagaccatacttctcatcttgagctcacactaacttccaaggacacatccaagcagactttagaacattttggtgacacccatccttggattcaattgagtacgccaagtaacagaactcaaaatcctctaccgcaatttctactaattctttctcttttataggaatgagaacactgtgatattggaatttccaaatcatggaagtaatgatggtctcgatttcagtgaaactacaataaggatgatattatatcctctcagtaaccacatttatatactgactgctgactcaactaggtcttttactttatctaatgaagtcttcatgtttaagaagattcaaatttccaatatcttcataaaatgattctctaattgcttaatacagatttggtaaaaacatactggtttaaattgacaaagtcctattttaattctttcaagaggaaatccagtggagggagggggtttacttctacttcaagttcaaattcccagtgcccaaagcaataacacttcttcctactgagaaaatactaactgaaccaaaccaaataaatgaatatgttgctattgatattcagtatattaatatatcattctgaagcctctgggaagcctatgacaatgacatacttagaccaatgtgtaaccctgactctattgattctttgcatctttaaattccaattatacaaaaacaatcaacctgcaatgacagtacccaggatatttataccttaagagccagtgtttcttggttaaatatgtcttccattatttgcctgttatttactttccttgtgattgttcttctatctactcaactttagatgctagggggaactcttctgaccctgaagtgtgtaagacaacacctggcctccaaatgcacaaaatatgatatgtggtcaagagggagaatagtggactgaagtgtgcaaaaaccatgtctacattgaagatgttgcaaggccacccaattgcctaaacttcataattttagagagttggaatgttgcagatgcagagccaaattatcttcctctgactttggtgtttaaataactatttacacccacctctgtgtctgctataactttcttgtaaatgtcagagaaaatctttcagaatgtactaacttagaagaccagaagcttccaccagcctcaaaactaaggacaccatcatcaagaataacatcaaagatccactaaagagatttccctgcttgctaactcccacctacctgctgttcccaccacttatgattacagttctgtaaatttaatacatgatggtgcaacatgaacctgcgttcctgggccaggagcatgcagatttggctcaagagtaatctcttgtattctgctgaggtgatagatatgtgccatgacaacacagttatttgctaatatctaaatatttgtgttcaaatacaggtgagctttgtatctgtcctttggaacaaaagactcttcagcagctaggcttcccaaaaatcttgtagttccagttgcaacataaactcatatttattttattgcagaagcaaaatataacacaggatatttgtgaaagctattagctataaaaacaatctttgtatttacatttgcttacttaaatttgttcccacgtttgaaatattttaggcatatgtagatctgtgaccacaactctaatggcctgccaggttgtggttttacacattagctggatattggcttcctaagtctagtagctgcatttgcaagcttgtgaactatttatttatttatttatttattcatttatatatttatgtacttattttttgctctatataccctcttgctctttagagatatttacacaaagaacccagatttttgtgtcagaaaaggctgaagagtcaattttaggacattgagatcactgagccaatgagaagcaacatattctcagcctctaggcttggtttgagctcaggtatgaggtttcatctgaagcatcttgcataggtggaacatggggcatctgctcttggtccatttcctcatggcacagccaacctctgaatgcaaagcagagactctcaagctggtaaccaccttcacatcagctggaaatctttctaacacaaagctgctaagtcagaaactttgaggtgaggccaagtcacctgcaaaatagcaagagttcttggggaatctggttcagagccactgcaaggccacactgccaagaatttttgtttatctagtctgatttcactaactcactttctagtttactttgcattcccacatccctaaaaaaaccttaatttctcaggcttgttttccttaatttcttcttgcttgtaatggtcacatcaaagcatctaaacttcagcatttctgaattttttgtttgtttgttttttcctgtaaaaccagtttatttaattaacaacaaaaactagttactttcaactacagtgttttgttttaggtctgggtttaaagaatacatcattggagtaccctgagtctgagttgggtttctgcatatactgcataactatgtttaactaatgtttaacatatattcaatatacatttatatgtactatgactactgatgcactttttgctttctgtttggctttgattagttaggattagattctcctgctcgaaataaccacttcaggtggaattgagaggtaggttttgatgagggattttatttatttatttatttattatttattttcctctcagacaaggtcgagcttgactttggaaactagagttccaggtagactttttaaaagacttctaacttgttgtcccagtatttctgaagtacacttccctcttgacctcttgataagcaaagtctgctacaattcctcctatgacatcaagtattaaaggattcagaatggggaatagaaagggagaaaatggttatctgtgtgttgaggcttcctggaacttggaattagtagacaagaatccacttacacatccacatcaaaatgtcaaggaaaaatgaaaactgtctactgcccccaaccttcaggttcttacacatggaattatcaaggacaacagaaaaaaaatggttactggcaaggcagccatcaagtcctgctctgtacttaccttcaccatgcctatggcttatgcactgtttccccctacaccctttgtgtgtgtgtgtgtgtgtgtgtgtgtgtgtgtgtgtgtgtgtgtgtgtgtgtgagtgtactcacgctcgcacatgtgtgttaatgttctagctctagctagtgggtatgtatgcagaagccagagaaagatatagactgtcatccagcatcacttccagtattgtacctgctcttgcttgtaagaaatacatttcaatttatagccatagcaccctgaatgtgcccaatcttatttgatcttggcaaccaagcaaggccaggcctcattagtacttggatgagaagaaatacattttaatgattgacctaaacatttgataagctcataagaaggtttaaactccattactattctttgcaaataatgtaaatgattttgaccctgagcttggatattcttcatgttagagctgtcactgcacacttttgttgcactttgaattaattatactctttaggttattgcaaattgtattattattattcagtgatttactatttatctgacttactcattaagaatttcatacatgagtactgtacttaaaacatttttgtcagtctgtcgcctgtctacctccgtcatgtccctccatttcctctcaaactcatgatctcttcttatatactatatatatatgtatctatgcactgctcatatgtatgtttaaagtgagtggcattatagttcagatccctagggagtcagagcaagtttgacgaccagatgttttaataggagagtactcaagagacagagccagtccctaacaaccaggcgaaccatgaaacagagcaccacctgtgtgcgaccctcatatttaaggtcttgctatgtcactgaacacgtgctagtgtgccgacccccaagagggcatggctaacatttcccctacatatatttattcagggctgactacttgggattagataactctcagggggtcttgttgctggagataattggttcttcctctcttagctcttctagccgaggggccttgtgaaactttttctattcccgttagaatgttgattagtattgtcattttgcaggtgttgtttaggcaaccatattgttgagactgcactggtgcagcttccttgtaatgtctagaagcagatgccctggtcctctggctttttcaatctttctgactcctatcctaggtatagaaattccattgtagagtagtcaaacgtggttgggcaccccatggtctgctgttttcttcattttgaccccttttagatttcttaaatagtttccatatattgcaaaaaaaaattctttgatgaggggtcagagctacactcttctctggggaatagtatgtagaatacattttaaattatataggtttaggaaattgacaagagttctcctcaggttctctgacatctatatcccttttattgtggctaggtttacaggaccatgcctgatctctctcactttgaaaggaacttgaatccagttatacatctcttatttggcttcaagatgaaagtaccggtattgaactatttaggaatatctttccatattagtcattgttgtagttcataggttctagatatgaatagaactattgattgatttctcccttggcagcttgcctaatactttcagtattgtgagagctagtgttagttagttccaacttgattcctacaagtcctgtgtctgaagtgagtggtttgttttctaatagagtctcaccttcaagtatattggaggcatccaagagtaagggcagagtctaaattgttttcagactctcttggaatcctctgaacaacaactaaaagcgaggattcctatgcttagtactggggcttttgttatatagtcagttcatagcttttgggggaattattatcaccctttgtagaatattgctatttattgcatatgtatgtattttacaatataaatatatgtatatatgtacacagatgtactttatatgtattgttattaagtttataatgtaatatgcttccctatcttttttaaaaacatcctaggagatagaaggatggtcgaatacatataaattgacaaatgtaataaaccattgaaatagacttaacaaaatcacattatcatctcattagatggagaaaaggcctttggaaaaatccaacatcttttatggtaaaagtcctagaaaaaataatactagatgagcatacatcaatatataattgatatgtatatcaattatacatcaatatacatcaatatatataagaaaggttatatatgacaaacctacagtcaaatcatcttaaatggagaaaaaccaaaggaattccacttaaatcaggagtgacatgtgactgaccctagtccttttcaatatagcacttgaagacttagataaagcaatgagacagtagaaggaaattacaggaagaccaagaggaaaaaaagaagtcaaattatctctatttgtggatgatatgagattccacataacaatcccaaaaattctaccagcagacttccagaacttgtcaaaagttctagtgaagcagcaggatacaaaatcaacttgcaaaaaattatcagtagcttttctatatacaaattaccaaacattttgtataagagatcatagatacactcccattctagagagccgccaaacaaagcaggaacaaacctagtgttttgatgattctccagtgaattccagagtagctacatcaatttgcattctcaccaatcgtgaatgggggtttctttcccctatagccttgtcagtgtttgttgtcagttattttttgatttttcccattctgacctggatgagtagaaatgaaatctcagtgtttttaattgcatccccctaattgctaagaaagatgagcactttttgagatctttcttagccacttttatttttttttcttttgagaactctgtgcatatccagaaagtcctctgtaatgaagactttatatctccaaagaaagggactgaggaagatgttagaagatggaaacacccccccatgctcacagattggtagaattaatattgaaaatataaccatcctaccacaaacaacttacatatccagtgtaatccaaatccaaatccaaatccaaatcctataatattcttaacataaaacaaaatgattctaaaattcataatggactcacaaaaagaacaatgctggagaaattatactagagttcaatatactacaaactactacaacctattagggctatgaaaataagagtagagtggtactgcaacaatcagacatatagagcagaagaacaaaattgaagtcacaaacttgtgtacaaatctatagctgatatttgacaaagattccaaaactacacaccagagcaaagacagcatcttcaataactgatggaaaaactgtggatgtccacatatggatgaaagaaactagatctatgtctatcactatgcacaaaacataactccaaatgaatctgatgcatcattgtgaaacataaatcactgaaactgctagaagaaaacagtcgctaccctacgagctattgatgcaggaacatctttcagaataggactccatttgctcaggaattaaggccaaaagccaaaagtgggggatcattaaacttaaaaaccctataaaacaaaggaaacaatcaaacaagtaaaaaggaagcccacagcatgggaatctttgtcagcttacatatgacagaggcttgatatgttggtatctagaatacataaggaactcaaaaacagttaaaaaaatggtcacagatctatacagagttttcaaaagaaaaaaaataaaaatggcaaagaaataactcagaaagtggagtcctattctgaaacaattaagaaaatgcaagtgaaaacattgagattttgtctcatccaggtcagaatgcacaaatcctggcaaatttgtaggtaaattaggagaagcatcattcactgttggtgagaatgcaaattgttgcagccactctggaattcattagattatcctcgcaaaacaagtaaatttatcatatgacccagctacgcctcactttggcatatgctcaaagaacttgacatcctactccacagatacttgcttacctctcctcacaatagctaggaaatagaaacaacccaagtgtcctttaactgataaacagaaactattattttttctagttccaaatgaagtatgcatttcatttcctgatcacactgtctagaatgttaaacactgaagggactgatttgaagccaaaattatcatgtttctgatcatagaaaaaagtgtttagtcttttgctattataatgatgattgatttttcttggggggtgttctcatttaattcttatttcattcaggaatgcattgtaaatatgtccaagaatttacctttcatatagttaggtaagcatatggtgaatcacattaattcaaaatccaactaatcttccatttctagaaagaattacactatgttataaaaatattccttattgtactttatactgacttgattgctgaaatttatcaaggatttttacatattgttaaaatgaatttatcccctgccaataactgtccaggcttgttttgccttctctttccttcccttccttttcctttcctttcctttcctttcctttcctttcctttcctttcctttcctttcctttcctttccttttctttcctttcctttcttttccttccctctccccactatctgttcctatgctccccaatctcttgctttgtgaataagtaactctagcttatcacctatttggaaacattaaacacaaccaaccaagtaccattttgtgccctttgctgtcaaaccttgttcttttaaaggatttttgtttattcttttctttcttcattctttctcttacttcatttcttaaggctaaatgagatgtccctaaaattggatttctttggtttttatcttccttagtggacacggtgcttcttatatctgagtcctccatctactcctgtagagaaacgttcacagacacaatttccacacactttgtctctgctccttctggcactcctgttttgtcttagaatatgtaactgtgttttattagtcatttatcctgttttccctactttttgttatttttcactgtatgtttgattctgaataaatttttcttcactaattgtcagctctactttctacagtgttcacattgtaataagaaatttattcacagaagtgtttacaagagatcatttttagttaacaaaatattgctatgaattttaaattcccagggacattcccaaaatttgccgttgtctttttgacattaacattttaaaggttgtttctgataattctaaccatatgtgtttgtattttctgtaattttcccaaggttatgttggtgttttcttttcctcttactttgccaaaaaaaaaaggcattaggaatttagtttaaaattgtgtttgtagaagtaagcagaaacctaagatgatgttctcttcccatatttgatactgcaaagcttttggtgtctccattttcattcagacagctgtgaaccctcatattctggggtctaaataaggggcacatatcaggactaccctgtactccctgcatgctataggctgagtaccaggaggccaggagatagagagtttgtagtgtggcctgaccgatgctcagttgatctcctgcaatcagaagatgtcctaagagctggagccccaaacctgaaactcctcttaagaggagtttgaagttaattttttgtgcatagtgatagacatatgcctagtgtctttcttctgcatgtggacaaccagtttttccaagcatcagttgttaaagatactgtcctttctctggggtgctgtatttttggcatctttgttaaaagtcagacaggtatgaatttcacattcaagtttttgacttcaattttgttctactgatctacatgtctaattgttccagctgcttttatgcagctgtagaatctgacctgataatatgtcagtatctaatttgaacacttcatggacttaaatgatttgtttgtatataaatattttatctacttttacagttggttacttgtttttagtggaagaaccagtccaaatgattggttctttgattatcagaattaaaaaattgaggcaattcttccttttgttctcaaattttctgtaataaaatatttgagaaaatgataattttgtattgttatctttattttttctcagccatttgcaaattttcttttttctatgcttttcagattattattgcatttataaatcatgggtctattgtgtaattttcttcttttctgcattcactttgatacttaaatctaggttttatgactttcattaattctgcaaatttcttagtttttcttttcattaattgtgaggtattctcaattcaaactcttttaatcaatttgaaaacttttggtcatcatgctctttttctttctcctaattaaattattaaatctctagcttacttcatctctattcagttctcatcaaactactgcttagattatccactgcatttttattacatttttctacacattttatagactttcagtaatttattatgttatatttgataatgcttttaaacaagacaaacaaggtcgcgtttaactaaaggatttgggagaactattggatgttctatatgtttatacataaatggtgaaggaaaaagcctgaagttctcctctggactgacattaatgaaaactcaaagtaaagtgtctgtttaaccagtgtacttggcaaattcccatgtagattcatctgtaagagggtatgtttcataagacacagcagcaaccacttccaaagtctgaatgtctttaaaggctcatctgtttaaataacacatccagagatgttttagggaactgctcaagactacacactttcttgaacattttcatacaggcaaggagaagggacctgaggttttctaagtgttctcaatttacattttatgagaactacatgtaaactacggaattgtatctgttgctgcatgactgtacaggaagcaggaccatttcatcagtaacttactgatacctctttcttggcattggggagttaccacagagctaagtctcagcactggaacaccaggagcactgaccaaggcaactcatgcttgtttcgcaaatgacaagaagggaagactctttttctatccagtcttggctgaggcgacaatcatgtccctatccagtcattcagagaacatttttctattacattcttgagttggatagaagtcattgaaatctggggattaagccccacttcctctccaagccttactggtcctctttccagacagctcaaatcttggtcagtcaaggctaaaaaaaccctgaagggcaggaacagcttggttttctccaagatttcagattcctctgtttttttagacttctggagttttccaaatctttctttttaggttaattgcacatttatcactcttgccttgagtttcagctgtaaagtatctaacctgaattgaattctcatttaatctagcctgctataatgaaaaaatggaaattatttctttaatcagaaaagaaagaaaacagtcacttaaaaaaaacactggattgcttcataaaactgtgatttcatctcttagttttgcgtatttaaagctttttcttatgaatagcaatcaatttctgggaattttcttcctcacttccattatagttttttttttttttttttaacaactcatagatgtttgtgtttggaaatgtctctcctgattacagcctgctgcccttcacctttcccttccatagactctcttgattaactttatgtcaaaagttataagttaatcttatttgcttcaatattaagtttgatcctactattcaaagtttcaaattaagctaaatcaacataaaaatccgctattacttagacatctttgaatgtgtcagcagaaaattactgttacttatcaggagcactttcgaaagagggattaaaatcttggccaataaactatttaagtgcaaatgaaagtaccaaatgaatttgtgactggtaatgcatcagttgtcatggataagagtgtagtattatcacacttcggcatctgctgctgatatttatttctgactcagcctcctgtcctctaaacactgtttttgatcatgtttgtaggaacagaatatggtgaaatttactagtgaaaagtccttaattttcatttttttcacctgcacagataaattcaaggagtactcaatttatttttgtcaaccatgtgataaagggaatgaaaaagggaagagacagacattacctcctagagggttagggacatgagcacactctgaagtatgttatcatagctatatctgaagactgttgtgtaccactcatagttgcacagacagggcacagtcatgataggtgatagagcatccaggtagataaaataccagacaggcagcagagaggcactggaagtttagtgatacccttagctctggaatccaattaatgatgttggatatagaagcaaaagatggcttcaggtgatgtcacaggaaacaaaagcccttgtcagatctcacatttaggatcaggaagggggaaacaggttggctgtcagggggagaggggagcacaaagaatcacacaaagaggagttttactttggagtaaagatactttgaggtctaagaaatgttttccagctagataagggtacacattgtcaatgaaggaaaggctggtgaacttattatctcaaactgtttgattttatacttaaaaatttaccattttagaatgtacagatttcatttcaataaattatttttaaaatacaaaaggaagcacagagaaccccatttgtgacattgtcagaccagccaggtccattacaaaaaatggataacactttacagggtagcaggctcttcaacaccagggataacaaaggcctgagaaacatgattcagctttataagtgaatatactttaatacttccaagggaagccagcaacagatgccttggggaaatcttaatttgacaccatttgaggtgtttgtttacaatgacctgggtagcacatccaggatggtccacaaagacagcttatttgtgtttttcttgtttctgaatatctcctgaagagactatttcccccaagttttccttccttcaaagactaaacccaaagtgagtgctaattcaaaatgcccataagctctccttattgcatgtgaaaaggatttgcacagaatcctaactgttagaattcattttttccctgaagggaggctacaatagctaacagcacagaacagcaatttagcccatggactttaaacattctcaaaacaaatggtgtgtgaacatgagaaacagttcttcttgggtgattgagtcatggttcttcctggatcaagatttcaaaggctgtctctcaaccaaggggagatacttctgctaggacataactttctctcccaaaaacgcagcagtgcattcatgcatgtttctccatgaagactagttcctcagatgcagggatcataaactttgtaaacacctacagtctgctgaaatgatctgtgaaaagtacaaactctgcagagatgttggtttccacatttccaagtcttctaaggactctagcaagtgcattaggcaataacattttcgtttattttgttttccaaaatgggaaatgatttccataattcaatcactccaaactgcaaatttctaagaaacagttgattcctaaaatagtagtgttgggttttcaacactgtccatagagctccctctgctactcagaacaggtaattttccagtgcagagcaactgaaattgacatgataaaactttcttattttaaatactctttgagaccatcaaaaattgaccctaatagaaacactcttctacatgtttgagtttgaggatctctttaataaagccaaaaaagtacacttattttatcttggtgattatgcagaaagaggctgctgaaggtctccttccaaaagacagaccatgaatttcagagaccaaaataaataaaatcattgttgctaaatatagaactaaggttagaaaaccttggtcccttttagcttctggcttaggaaaatatttcacttcgtaaatctgtgctaactcctgttgccttttgcctcctcaacaacgacatacccaacagctctaattctagtgccagagcaccagctactgttttcagatgttaggatattgttccttgttcaaaccagacttctaaagaactgtgttgcctaccagaaaaacaacaatgacactgagaggcagttgtggttactatgagcatgaccctgctctaactgctgtaaaaataggaacaactctttgcctcatgtccagaaggaactgatgagttttgatgaggtcagagtcatcatcagaatctgcctgtcttcctaatgctacctgacactggtggtccctttagtcacttggatttcctactatgtatggatattttctaatcttaccctgatctataatgatctttcttactccacactctccctccccaccctgttctccccccacacacaccaaatgaggtccagagagaagagtatggtgattgacttactcttctcatatttttacattttgtaaattgttgacattaatactgaaagaaagaacccagcattgtgtgtaatatcttgtgctgattagttttatgttaacttgacccaagttaggggcatttgggaagaaagaattctgagataatgcctccataggattggcctgtaggcaagtgtgtaggtcatttgcttgattggtgatttatacaggagggcacagtccaggtggtcttggatggtttaacaaagcagactgaccatgccacaggagaaagtcagtagtcgtcactccttaattacctccacatcagttttctgcttcctgccctatttgagttcctgtcctgactccattcagtgatggggaatagctgtggtgtggaagaacaagctgaaacaaaccctttgatcctcaagttgcttttggtatgtgtgctttgtcataacaatagaaacaataactaagacctatctgtttgatgggttgctaacaggatcattgcttccagacccctgggtcaatgttcagtcttaagttggaaaatagatgcctcattctgatgtgagccagaatctccagtagaacatccaatacaaagattttaattcacagttataatttttaattaccatcacagacttccatgtcccaagtgtgggaaaaacctatgaaagaagagaatctgtgttagctttttggctaatgtgcaaggatacttcccagagtcattgctgttttgccctgtgaagcagagactacagccatgccctcttgacagcattcttattttggtataggttcacttgtgttttctctttgcctcaggttaaaatttgtttttctatgatcataatcatatgttgttgtcccaactccttttctcatattccaaataaataaacacatagaagactcaatgactacaaaatattaccttctgctaaccttctgtgaaagggaaggatctttacataattcacacaattcagtttaggaatagtaagcctagaatattttggatgaattttcttccaagtacacatctttaaggggtcacttttccatgtctacctacagactcatatctttatctctgtaaatatggctaagccattttgtcaactgtaatgccacatgaaggacagacttctactttccatcacaacccatcctgagcatcttccctgacggcagcagtgtgatcacacatgactctgtacacatcccatacagttcagtctgacactgatcataaacttaggaactcaacaacagcagttattctttctgagataaagtggtaattctctctgtaccttcggttttctagccctcccaaactttagcttcattccttgtagtaatagtaatcattattccttaaatggtctgttctccagttttatcaccagcttctaaggacatctagacaatccatgctggttggtggcatttgcattctgagtgtcactggcagtgaccagagaccattgttgtgttcgtagatgtggctttaattttaaatggctttattactcatgagtttgaggattttcttttttgtttatggattatttcctttttttttcatctgtgcactgggtgttcaggattttgcccaccttctgcttctttatacagttttcacacaaaccatctggcagctgatgttctttcttcacaaacaatggcttggatttctaggtgtcttctgaggaacataacttccttctttttgtgaattcaattggttataaaagtttcatcttatggtgaagtatataatttaaatgagtaattgcttttcctgagacaagggtcacttatgtctaggttctcttttaaaggtttgccaggtttaacccgagctcttaagattgatttatcttggacaggctgtttggtgtccaaacagcatttctctaagtgatcttcatgtgtacatcattcttagtcacaaaatcagcacaagccttaccttatcttcttatttgattcaactttgtctgaatgtatagatctagagcatgtaatacatacacgtgtttatataatgcttcatttctaaaattactgcaaccacctcccatatttcagcagcaattttagtatgtatctctacttacatgtttgcagcattttaggatttatattcatcttgttagtacactatactttcctcaatagatttgatattgtatataatgctgacatgaacatctcaagcatttatattgtttttctctgaactaatatccttatatcacttcattggccacccatgcttaataagctaggaatagtgtctagtacctatagtcttagcactcaggaggtagagaaggaagatctgagatcattaacagctacaagacaaatctgatgcgctcctgaactaaatgtaattttattgtatacttacattatatacatataatatatatttctatttccaagtgtatgtacacacacacacacacacgtatgtattcctaagatacaaacctagaaacagaaatgttagctaagagaaagactattttgtggtttcagtataccatattttaagattgttatactcaattgcaaaacaatactgtttttcaggtatgttcttgctccacgggattagaaatgaaacagtacttgagctgagttttgcttcaaattgatttgaatgactgtgagtctacataagtctgtcttcagttcagctgtgcatatgtatatacataatgtggggagccagactgacccaagactttctcatagatcctgataaaaggacaaagggaactttgttctgtgtccttgtccaggaatggacttgcaaggccaggctgaagctagagccaagactcacaggaggcaagatggtggtatctgggcatccctggttatcctgtgttctctttgccaccattgtctaatttagctctctgctgatcttgaccatttgccccttgatagtagtatatataatactgcacatcctaataaacttgcttggcattaagtcatcatcttatgtaagacctcttggtcccagctatcgtttttgtcttttttatttctcatccttgttgtttcttatcctcagtcctcttcctgaacctcactgtttaggacccttattcctgtgagttcagtttacataagttctattctctctctctctctctctctctctctctctctctctgtgtgtgtgtgtgtgtgtgtgtgtgtgtgtgtgtgtgtgtgtgtctgtgtgtgtgtgcattcacacacatgaacacatgcatactaattattggactcagagatacatgcatgttagactaccctatccattttgagcctttcctgttttcctcatgactttaaaagagaaaaactttcctagatttggcccaaacatttgaactgaaatgttggaatccctttccagctgcagatagttgtatcatgtttatgaaagtcactgccacttataccttggggaattgcagattgaattactgtcatgttcagcgatacaggcagagatcagcttcaaagaggagggcttggatttcatcctattcacagcagtgctgggcagggaagagagaaacacccttcttttattgcagtgctgagttcagctggcctcatcagacagtgttttactctagagaaaggagcagcatgtgctttgtgatctgtgcacacagagcttgaatcgaactcctgaagacatcagagtgtacatggtcattgcttcctcacgtttgggcatctgtcaccaagccagaaaccaaactggttcatttactcacacatctaatgaggtgctaaatcttagtcattatggacacagctgtccttcagttccattgttacttatgtagattcctccaaggcctttaagcatgaccttctttgatgggggatgtcatctcttattggttgatgaataaaataatgtttggccaataaagacaggaagataggtgggactagaagacaaggagaattctggaaaaggtaggctgagagagaactggaagagacaccatgtagacaccaaaggagtaacaggtcttggcattctctggtaagccaagaccatgtggaaatacatacatttatagaaatgggttaataattaagacagaaatagccaatgagtagccttagtcatttgctaacagtttagtaattaatatagcatctctgtgtgtttatttgggggctaatggctgtgggatttgactggaaaggaaactccagcaacacttcttgtattttaattttacttgtactctattagatcatctttatcagcaaacacacatatatacatacatatacacaaacttgcctcaaaacatcttaacaaagtggagagagattactgagtcaagcaatcgtaagaaaagaggggtcttaatatatcttgattcagaagttcatattgcaccattgaaattctgtatcttcctcattgtcagcttgctattttatttttgttggcctgaatatcttgtttgtcatctcaatcatgctgatttatgatgtgtacctgttccttatcttgaaactggaatcactcaagaccagcaattatatctcattcatctttattttctttcttatatactatgttgccctagctgaagcctaaacaaatatagttaattggatggatgcatgtgtgaaatcagatcgcagagttttgaattagaagattattgaaagtacattcccatgttatgatggagtatagtttcttaaagaacaattcatgctgagaaaattcatctaataatagcttagcagaatggcagaaacacactggcacagtcttctatttgtgatgaaaggaaattttgtggtttggaaccattttcaattagtggaggaaaagatttcataacaatccaagagattagagacctgaggaatgagtcacattaacagtctttctggcacttggatagcctgaatcccacctgagactgtatttctatatgcataaattcaaagatttacttagagtcttaacacatattatagataaactgggataaaagttcttcaaatgatacatctgtcataacattctaatatattctgtgatatttccctgtggtgaatatgcacaaattgttattagtgaacagaaggcattcattttttacaagaattggactattatgatcaaacacccagagccactagaccaagagacttcttctcagaacaaggtgcctcttgtcttcaagtcctcagtaaagtgtgatagttactggaccatcaatggactggcttaagggcacccattgaaaaggccgggtgcatttcgtcctgtgacaaaccatcagagcatgaatacgaatacatagaaatagaaatcaagataacttattaagaaggggaacacactcctgagcataaaaatgagtgagctgaggaaaagctatgcactcaggtagcttgttacttagccttcctctctcaggtttgttcagtgtgtgcttttcccactcttactctctacatgaagcccaggtaggggatagttgtcagctttcccctccacaggcttctttacttattaattatgattttactttccacagtttctattctgctgcaaaaacagtagtcattatcttcatgaaaagtaggacattaggaacataggattccgaggcctgattcacatgcaaggcactgcagctacatgtcattcatttgtgtttactaggttttggtgtgcattagtcaagctcatattaaagtttggtgcaaacagcaacacctaccacaaaaatgctcttgtgggcactgccacagaaaccaaatataaacaggacttcaggtgtatacacagggagtagcccattttatgaaagcccaaacataaaggcctttgggattgtaaagaggtggaaggttaagagaatatcatgggaaatgataaacctgtacatttcagtttagtggttatttgatagtagaaaaggcacttgatttacgtttttaatcagacccgaaactgttgactcactgtgtaagaagttaaaagtcagattctaaatgtagactaaatccagagaaaaatcacattttctcaaagaaagatggattgattaatagatatgaaaccatgtgccaatttgtaatatttttaacttattttatttgtgtttatgtgtagtgtatagtgtgtgtgtgtgtgtgtgtgtattcagatgtattttattttttctctgaatctatttgttcaaatctgtgggtttatacttcctagagcattgttttataaagattttaggttaaaaagtgcctttgtgatgagtctgttttcttcttcacattgaaggggtaatagaaaactgttcagtaaaatcacaaactaccagggaaaaaaaacaaacagtaacgatttgtatgtgtgtaatgataaagtaatgataagactgtaggattaagttttatggttaaagctagataaggcaattggtttaccttctttatctgaaccaaaagtgctgactcattatacaagaaataatgctgattcatgtaccaggctctttcttttggaccaccaaccagctcccaaatcataacatggagacttaataatagttttgaagctcagcctagcctaagctcatttctggctagctcttttaacacaaattaacctgttccttgttatctaccttttgcctctgtgctttttacctttcttacttctgtttatcttactttcactccatctcttgtctagcttgctgccagctgcctggcttctgtctctgggcatctcccttattttctcctttcctttttctcttgttcttccttctggcctagattttttatcctacttattctttctgcctgcctatactttctctgcctacttatggaacattaagctctttattagaccaatcaggtgccttaggcaggcaaagtgaaacagatgcaacacatctacataattaaacaaatgccacataaacaaaagtaatactcctttgcacagtaaaagtaatattctgcagcataaacaaatgtaacacatctttgcctagttaaaataatattccatagtagaggcattgtgcagaaaataatatttgttatccacaaccatttctccagcctgtggcttttatcagccacttggatggttgaaacatgcagagttgcatacaattctaccagaaattttagtattcagatgtgttttattttctgtgcatatatttgttcaaatacatgagtttatccatcctaaagacttagttttataatgatttaatgttaagaagtatctttgagatcagcatttgtggcaaaattattgacagctagtttcaatatatggcaatattaatgatttcccattagatccaatttacctaaaatggtgaaggcaccaggttttgaggacaattttcagagtcattatttcttatttaggaatttactgttttctacaacaatctataatattctgaaaaaatgtgtacaattgctcatcagtttggcagtgtttgtgtgatagagatgaaagtgtctacaggtatccaatcagcacggtgcctgtgcttcaggagtccactttaagttgggcatgactggttttattctttgtctccctcgttcccccccaaattaactagaaagacacttagcccatttctctcagcttcatattccgagtcaatctgaaagacagttctaatctatgttgtttagccctttgatgactggatttttggatacaagttcaagttttagtgctttgatcttctaccagagccagccacacacagtgtgttattgtgaagggtaggtttgcagagaaagtgtgctttgaataatcaactcttgtaccgtacttctcagatcattatcttatactccttagtattttgtaaacccatttcagccagtgccagtaatattggctgctagcttatggggagtgtcatttattttcagctttgtcatggtgaatagctagttttctcaatagttagcctaaagtgtttttggaaagacatatgaagaatcaaaatgaaaggagaggatgccaactctacaaaaccagaaccttgaaaactgtatcactaagatcagggtcttcacagagaaacccactttgactcaaaggactctagattgtctctcaagttccccttctgctggggacatggaagataacccctgccactagctcttctcacttttactggttagtttctgtagagaattttatataggaaggagaaattagaaattgatagagaaaacaactgatacgtttctctgaagaaacatttcactgttacttgtagtcttagtctatttctcaagcccggaggattaggataacctttacactgagttgggtgctactggtaggagcaagggtcaagtcacagactgaaagtatgaaataattggataatggagtacacaaagttaatatgcaatttggtttttgatcttgaagttactggactccagtcacccagcatggctaatttcacaacctccttgttcaataactcagacctttggtgaactagaaacaagaccttcttagcactctgacattccagttaccttctgactgtgcggggcaaaaatgaaatgagaagattctgcatgtcccacctccttcaagctatagtctgtgctgtggaaggaataattttaatttgtcaaagaacccctccaatacttttgctaaagcttttacacaattttttattgcttttaggctaatgcctcaaatcattcacatttatcatttaaaaaatagtttataaaatgcaaatatacttatttctttatcttatggtttttcaagacagggttttgctgtctagctttggagcctgtcctggaacttgctatgtagatcattctagtcttgcactcaacagagatctgcctgcctctgcctcccgagttctgggattaaaggcatgctccaccactgcccgacttgtacttaattctttatctttaattacaaaatcaaataaacagttcaagcagttatcaaagcatatttttctgtgaaagaatcaaatcagccttataggttaagatctgcattttgaaaacaaaaatggagtagaatataatatgtgggtgaatattgcatgtactataggccaatattttatgaactttgcttcaaatatacttctaaggtaaaatgatatgtagtatcataaatatgtattccattaaatatgacatgcaaatatatcacctcatacaatagttcaataagtatttgttggaaataaagttgctggaagtaataacctatggaagtgagttgtcaggatgattgacataatagagaaatcctatgatctattaaaatgaatgaacttttaaggagaaaagagtggggtttgtgatcaggaccatgttctgtaatgttttcaattctttacttatggtaataggggcatagtgctctgttgggtctacaaatctcatgaaaatactctatggaaaagattgcacatcagtgttgtgatcttggaggatcagtcacagctccccgaatcataagctttgttcaggtcttttctccacccagttcactgtgatgtggacaggaattttgcaggatcctttgtagtattatatctgaactattgtgaacacattcaggctgatttgtttcttcaagttctttgagagaaataatcatgactgatttagaaaagtcacccttgacatacttatcttctgtagattaaaagcatttgcatagatgaccatggttaatatttaataggaatccaaaactaatcaaatagtaatgcaccaaagattatagcagaagaatcaatgattaattaaggattacctttacaggaacattccgacattgctggtgggagtgcaaacttgtacagccactatggaaaccagtatgttgatttttcagaaaattggggatcaacctacctcaagagcctgaaataccactgttgggcatatacccaaaggaggcacattcaaaccccaaggatatttactcatctatggtcatatcaacgttatttgtaatagccagatcttagaaacagcctagatgcccctcaactgaagaatggataaagcaaagtacacaaaattttcaagcaaatggacagaaccatgaaaaaaatcctaaatgcggtaacccaaaaccggaaagacaaatatagtatgtatttactcataagtggataccagacataaagcaaaagttactcagcctacaatccataaaccaagaagcttgaaccctcctccacaaacagatggaagcagatgcagaaatccacaactaaccaatgggccaagcacctggagtacaattgaagtaagggagaagcaaaaatatgaacaaaggaatcaagaccatgatgaggaaacccacaaaatcagttgacctgagctagtttgaaatcactgacccaggtttgacaaatggggaatctgcataagaccaaactagattcccttaatataggtgacagtggtgtgactggaacaatatatgaagccactagcaatgggtccaagatttaactataaaacacaaattgacttagttgatcccattctatatggagagataccttgcccaccctagctagacacatgggtgtgggagtggagaggtgccttgatcctgcctcaactagatgataggacagacttagtggacttactaggggtggccttacctttctgtggagtagatgggagtggggagtgtcagagagcggggagaggagaggagaactgggattggaatgtaaaaaaaaattcataaaaaaggagaaatatttcattgaggatctaccactagtcagccaacaatatttacagacagtgacaaatatagtaataaacaaaataatccccacaaaaaagaattatttttatagcttttctaaaagcacaggtgagatgagtttatgtgcggaccagggagtacaaaagtacatgtgataatgttcacacattcttggaagtttaccttattattgatactggtgaaaacatgagtgattacaaaccaagttgcttttaatagagggcattggccacaattggtaaccagaaggcaaatgatttctcaaggtgtttgatgattcattattcttgtaactaagattgctttaataatttcttttctgaaagctcattacagtataaagttgatactgattttcttattttataaacaaggaaaaatagaatttgtctttattgatagcacatttacacaattagttatttctggttgaaattgttgcatctgtttttggattctataacgaagatacaatctgtaatagatatcaaaatgcagcaacattttttggctgttgtttggttatttctacatatatggagagagagagagagagagagagagagagagagagagagagagagagagttgagtaggtagagaggaggggaggaattgagcatatttctttcttacaagaatattgtatgaaaatacatttaacttttttaaaaagaggtaaaaatagattggtatatgtagatatactgttatgtctcttctcttagaggacagacttagcatttctctatccagcatgatacacactgaatttgacctgttgaggaacaatttatagcacttaatttattgaggtgtttgatcattaaagggatgttgaagtttatcaaatacctttgctgcatctaacaaaaacattctttaagtaatatttcctttcctctttaagtaatattttatgtttactgtttgtatatgttgaagtattgttggacatagtagctcaaaaccctgtgtcaagtggatagtattttgattccagccaggagctcgggttcttagatgaagcactcaaaggaagaaaatatgaggctggataaatgaggggcaggactactccttattcctctttgtttccaattataatcagtacttcgtggcaaaactcctaccttttttttctgaagcttctaccttttaaacttgtcaatgtttacttccatagaaccattatatgttcaaaatgcttactggaatcaggccttgtaattaggcttcaattataaagagaaatcccaaattaaacactaacatacactttcacatcttaaaaacaaataattttaaatgactgtcaactcaaaaaagtttagcatcatgtgggaagatttcattggtcctacctctgtgggtttcctagagtaggttaattgatgttggaatgtccacattgaatgtggtggcagcattccacgggttggggacctgaagctaaataaccaggagaaaggggttgagtagcagccttcacaagtctctttcctaaatgtggatgcagtgtgaccagctgcctcacacttctcctgcaccatgcttcctccatggtgagctatgcgcttgaactgtgagccaaaataaacatttctttaaggtcctttatatcatgtgcttttcttcattttttttatagcaatgatcaacgtaactaatacacatgcaaatgctttaagttcaaccatttcccttatttatttatttatttatttatttatttatttatttatttattagtttttcaagacatggtttctctgtgtagctttggagcctatcctgactccaaaatcacagagatcagcctgcctctgcttcccgagtgctgggattaaaggcatgtgccaccaacacctggaccatttctcctatttaatgtaatgcagacagtgatactgatctacgtctctacacccatgtgccccaacattgtttatcaccttcttgcctgcactgttaaaaataattgaagttaagcagctttcagctttccacgaacattctttgtttcaaagtcaagaattggatacctgattatttctctcttttttctttttatttaaattagaaacaagcttcttttacatgtcaatcccaagtccctctccctcccctcttccgctgccccccacaaactctctatccaaatctctttgtgctcccagggaggatgaggccttccatgagggatctttaaagtctatcatcatttggagcaaggcctagaccctctctcatgtttctaggctgagagagtaaccctcgttgtggcatgggctcccaaagtccatttgtgtactagggataactactgatccactgcgagtggccgcatagattgtccagacctccgaactgatctcctcattcaggtggtctggaacagtcctatgctggtttcccagctatcagtctggtgtccatgagctcccccttgttcaggtcagctttttctgtgggtctcaccagcctgttcttgacccctttgctcatcactccttcctctctgcaactggattccagagttcagctcagtgtttagttgtcggtgtctgtttctgcttccatcagctactagatgaggactctagaatggcatataaggtagtcatcaatctcattatcagagaagggatttaatgtagcctctctactattgcttagattgttagttggggtctctgaacatttccctagtgccagaattctctttaaacttataatggctccctctatgatggtatctcttttctttctttcctctactcttcccctgactagatcttcctgatccctcatgacccctcttccctcctcctctccccttctctttcttctaactccctctcccttcccccatgctcccaattagcttaggagagcttgttcctttccctttctccaggggaccatgtatgtctctcttagggtcctccttgtttcctagcttctctggtggtgtggattgtaggctgatgattttcaatgtcttgaaatgtggacagtgaaactgaaagtgaaccctccagtggtcaggcatcacagtgatgtggcactgtgagatagagaaggattgggaagctgatggctcaaatgtcacaataccttgatgggtgatgttcttctgtatatattttctcttattggttgatgaataaaacactgattggccaatagccaggcagaaggcataggcagggctatgagatgaggaaaattctggggcaggaggcagagagtggccttggagagactccatgtagagaccgggaagatagaatgaggcaggtgttctctggtaagataaagccatgtagaaatacatagattagtagttatgggttaataattaagagagcactagccagtaagaagccctagccattggccaacagtctataaattaagataagtcattgtgtgttttttgggactaattggctgtgggacaaggctgaaaagaaaccccagctatacgacctcatagaatggatgattgcttaatgtgcaaccttgctccagcctaccattgagcaatataactttcaaatgttttgtcaatgattggggtcatgatagtttgatgctaaagtccatagttaaatttttttttctaaacactcttctccactctctctgaatgcttagtgatgggatattattattagaccaaatgccttaaagaaattattttagtctgaaaagaaaactaaagaaatattcagaaaaatttctagcatagtattgcttttttatcctgggataaagaggaagttatttaaagtgatagttagttccccagatacttattgaagacttaatgtaaaacatttatgggacaagaaaattcagtaacaggtctgtgtgcactccaccagtcttccctcactcccctttctctcaaagtaggccaaactctgtgacgtgcaggtccatcgactgttcaagggctcccactcctcttcagaagatacagtctgcttcatggtaggcctggctcacctcaggctcctttctcaactcccttccccataaatggtgagcttcaggtcacttccaaaaagaaaagtctctgtcttgagtatgtgaagtagaatatggtgccttaccactgtgaaagccaatgtttgtcttctgcttccttcccaccctcttttgttccctctcttgatccctcccttcttcttgggattgtgggagtgacctatcatgatcagcaaagtgccttatttcttcctatgcttcttcgttttttattccccgttttccctctttctctttactgtgttaattactacttcatgtctttagtcttgatatgactttattttaggaaatctttctgagtccctttaatctgcagacaatctgactccttcaagctcttatagaactgaatgatccccaaccatataattctccacattttggtgactatgaattgattatctccacttacctgatagataattgagtcccagatgctaacagaaggtagatgtatttgataataaagaatttctaaaatataagtgatatgcattctggttccaaggaagtgatttgagaatttttttccttttatgtactgagtttatatctaattttaaagatgtttcctatgaaagcagagcacactaaatggttagttgttatgatttcagacatttaaatgtgtttgaagagaactgtgggcagcaagatatggaataatgtggactctgtggcagtatcattgtcaatgtgaagtttatttaatatcactgtaaatactcatgaggaatagagctataaaaagtaactgtgcttccatttttagacaagtcccttctttggtatatgtgacccaagcacatactgtctttggctttgcaatccagatagagttacaccctatgcctggcatttcattcccttgagtatttacataatccccttggctgtgactatcaatttacagagcaaaaggattcccatcataagttcttgaagtcatatacttggctgcatcacaaaatgtgttttacctggattatgcctggcagtgcaagccctcaggtgatgataattttggcggaactcgatacaaaaccttctctagagatgatggtgaatagtcaccagatattcagtgaaataaaatctgctaaacaaaaaccacctttggcatgttgtcttctttcaacaatctctgactttagaaggacattttactacacaaggcactgaacctgtcaggagcaggagaatggctctgtgactttagtctactgtcatcatttttcaattttatctttcagaagaaagatggtgcaagtttttgtgcttttggttttgtataaacaagattgccagcatattttaagaatggtggagggtaccatgttaagcttttttagtgtttaagcaaaagttcatattagttactagatgaaaattattgaactagctattctgtgagtagagcgaatagagtaaatcttggctggaagcagtaaaagcagtacgatatagctcattcttcattcctttatgtgtacatttataatctataaaatctagaatactgatacctgtaataatttcaagtgccaagtaacctgcataccattttatggatgttctttagatgagtttccactatcaaaatgaaaagaaggaagaaatcttttgaatatgccagtgtccttcagtgtcaatgtccttccaaagaaattctcctatacaaacagaagcactgaagccactcacaaggattctcttggatgcttgagacattcacatttgacgtttgtagaggctaattcacatgaatggaaactactagaaagattctgagtgcctttatcaagtgaacttccatgcggagcaatatttaataatgggtttattgacttgctatattcctcttttgtattactaagtcagcctttctatcttgtcataaatttcttcaatttaagtaaatttctggcattacccaaacagttcttaagtacagtgcatgaagaacctgatacaaatattggaaaatggagctttagcagagagttggggcatgtatgttttcgactgactgtgcattgggctctgttgtttgaggtaatgttggaatagcttctgctatggcagtagtgctcaaatttagaaccactcattcaacttggtgaagtaaaaattgctgacttctaaattctttctaattaagtagggtatgatataacaaaataattttgatttttctgaaatgttctaagacagtaaaaattatgttatggtatgtgttttgtaaaaaagaaaaacacaatcttcctatctctggctttttaattaagtgagaaacacagggattattgagaatccaatataaagatgtagattttctacaagctaagatcattatttatatagaaagcaatttctatagcaagtcatcaaagggagaggactgattactcatctgtacccagctcccaactgagggagtgttaagtactctgttgaactaaggtcctgatggaggggaaaactgagtacagacctgaaccaagtctccccaatattctcagtcaatttcagtaaagaaaaaggagtgatatgatatgatttgttatctaggtaaaaatgaagggcatgttgaggaatactaacaagagtgtgaactgtgtgaaagacttctagcacattcttcagctctccagctctgtttttgaccatagcacattctaaacttcaaaagtctgaaataacacacaaatgtagaaaggcaaggctgagtccaagtcatggtgtttgtaggctacaaaagtcttctctaatatacagaatgacagtatttatgatctctgttcggaagagaacaagcttgcatatgtttttcaaataaagatgcagagaatgagtgtatttaaatttaatattgagcatgaattgacatgctctttgtgatccatataagtaaacactcatatttacatggttgggtatgccattatacacttataaaaatctttccagtcggtatactgaaatgtaaaaaagatttatttagctcataaaatagtaacagaaatcaaagagtaactttttataatatgaatcacaaatctcactggaactgttgtagttacataaaaatatgtgaaacaatgccattctatgattttaatgagtattacatattacaagtatcattacacacaataaaattctagcacaagatcatcgagtatattaccatacttcctgaaatggaatatgtcttgtaaaagctattttctttgtaaaagcatggttctgtatgtttcttttattatcacatcattttctgcatagaacaatcctttatgagtgcagtttgctgcctcattatggacacactggatagcctaccatctttgtcttgacaagcattatactgctagaataaatatcccaatgttctgctcagaggacatcatgagtaagagtataacaaggaatctgttttatttttctaaaaaaaagaaaaaagaaacaaaaaaagaaagaaattgaaagagtacttggtagttttcagtagaaaggagaagaatatattaatctatatgatccttatgaggtcatctaggctccacacaacagaaaacaaactgtgaaaacaataattcaataaagaagacatctgattataatgaccagttttctccaagttctcgctgatttgtcttaggtgaggaaattcatatcaaacatttgtataatgagagcatgtagtaatgtcttatctttcattgtatgttatagaaatttgtatgtgattttacaagtaaaatttgataattttccttatatccaagtgtgaaacataaggtattgagttttagcatattggcatagatgatttaattcaatgaattcggaaataatgaaaatattcaatttctgaaataatttatagtgaattaatgggaaatttaaagttaattacctatctgttattatattcagtcttgtatgctactcaatgataactaatgcagcatcaaataacttaatacagcaaatctctggctattatttttaccaagaacataaaaatagacagtttatctttagtgaaaagctattctccaggacagatgaaaggttaaaaaaggagaaaatagtttagtataacttgcaacaaatattcatctttttagatggttagtagacctttcaacagtgtttttgttttgttttctcagaaaactaggaaagtgatgaactgtgaatgttcataatttaatttccagtttgtaactatgtttgcacacacacacacacacacacacacacacacacacacacacacacacacacacacatccaagttgtcttctataaatcctttagtctcattaacagggaaatgaactgactttccttatttttcaaacgtcaaacataaaggtcaatcaagttatcagatatgtctcttcttatcgaggaaacatttaagttattcactttttaaagtcataaatgtgactattataaatcttgaagtttccaaagagccacaaaagtcaatgacaaggtactattcttccagtgtaattagccttgttaaatttatatttataagtgaggctatacaaagtttccacttgaaatagtctctgaaaataacatctatttggtggaagccatctatcagtaacttttaagaagtattttttttctatagtcaattaaaacggagttttattaatagtaaataatgctctcatgctattttatttgggaagaaggtgagacaacttggctgtgttttctgtgaacctccatctgtgaggagaatgtgtttaggataagtccttaatatccttttttaaagcatgtttgtcgtttcttattcaatgtagattactggagcagctgacatttattttctttcccatcgcctgatcttggtaccttaaaatctgtcttccatttgttttgcatttattcatggtctaatggctccctgtgattttcaattagaattttcttaaggggcgaattttaagatctttctttttatataatggctgttaatgataattatgagtttaaaaagaaaagcttctatttgctaactaacatcttgagcacttatttgtttctatttcaaccattaaatttgattatataattcacttgagtacatactgttatataaataccatgtctcctaaagaacatatttgtacattgaaattcagagccgacctagaccacattaatttttgaagaatggaatgtcttcctttataacaaaaaatgactttgtaagctctacactccaaagtaaagttttactttgggctatcaacttgtacaacttctaggttgtacaggttttgaatataacatagtcacaaagattttatcattcttttcttatattcatcaaatcattgtagtggtgaacaaagagattactatgacatgcacatcatccactcaggtttgtagggagattttaataaaaacatgctagaaaggaaattctcttaaaggtataaataagagttcagccataacaatccccactgctactcattcctcaaatcatgtaatatgttctgtcattttgacatatagcatgtttcttttcctccatcacctataaagtaactggattgtatggggaatgaaagaaaaaggggactgatggcccctgctgctatttgtatcattgaaacatttttaaatcagtagatgttaacttaataagggaaatcccactgacttcatgtctcctgcagacaatcaaatggtgtggttgagtctgtgcctctgttcagtcattctccaacacaatctggcaaccaatgacagattccaattaactcaaattagattaagaagaaagatgctaagtacttcagcatttttcaagcttcaaagatgccgagtacaaaaatgttaaagggaaaaagatgggctactactttataaatagtgaaagcagcaacaatcaatccaatgtttgtgaagtgaatgctcctgattttctacaagaaagcatttaccatttaactcaggcttcaaattcaggctttgaaatgccattgagcctttgctagttcttggttccccttttgttgttggcttaggaatgcagaggacattagataaacttagagaaattacatatttaaaacatatgtgcaatgggaaatattgtaaacattacttatgaatctatgtatacatacaaaatgtgtagagactcatctttccagcatattatcaaatatgctatataaaaatgcacatcagaaattttaccctaattttatcgtttgagaaatctaataataaaaagatttcagctcctcattcaagtgcttacattttgtaatttctcatgatctgttcctcagagaatgatataatgagctttcaattctttggcttcaaatgttctctaatttcttgaattctcatacactatgacattacaattgtgaaggtaatttctagcattgataattattctaatgcaggcttattatttgtagttctaatcttgttgctacatgaaaaatgtaaggaacccaaatctaacatgatagaaataaagaccaattagctaaaatttgaaaataaggactgcataaaggaagagagacagaatgaaagggcaatgtggtaagggcagtgtgaaagcaagtagcctgtcttcctcaatttcgctatacaacatgcaatgccactcattcctcaaaggaagataccacttaaaagaaatacattcttcaatggtttatgttacaacacactcaacaagtccttcagtgtttgtggcttgcaataaatggttgctatatttacaagggataatttgagtttggaacaataaaaaaaagaatttttgtgaaactacttaatgcacattgttacctcaaaatcattgagctcttgtggtagactctgtaatccatacctttctctctcccatacatcacattagagtctgggagctctaagctcttttcctagcacatggagagtaatggtataggaaagcaagtttcagatccaatacagcatgcatgattcctaccaaccaagaatgagaacattcaacacacatgttatttaaaccaggtgaaattcaagctctccattagaatctctgtgacaagagtcttgaggaagacttagtcaaccacttagccatgattagaggagtctcccatcatgcctgtgttaggtatgatcaggaatcttaggaataaggaggatctgggaaggcaatcaggtcctaagtaatcaggtcataataccatcttgccacgaggaaattcactgctccctgttgtattgaaaatagagcaattatattggaagtcacagcatgcagagtgactatttttagttatggaatactgaataagctttttccaaaatgcttttgacctacacaatgaatgtattccttattgaaatacttcaaaatttaccttctctagcctatagaatcattaatttactacccatataacatatggtttatgatgaaatatttaaaataaactttcaagaatataaaattgatataacctgtcaccaaaagggtttaacagtgtcctgaaatgtctgcagcatttccttcaatatctgctgtaaaattttcttctgtaaagctctttaatttataaaaataagactttcttctcttgagttccctaggcatagaattttatgtggcaaattatgtaaaaatttatgcaatttccccaaattacacatatcatttaattaatagacagaaaccttgaaaattaaactatgaaggtgactggtcttgccactacatgaaagactgaagggccactctagcccaataaggagtccagagccttcctccagttcagataaagcttcagttcttatttttggttttgcattgatgaaatttaaaattattttttaaatgcctgactgacatagctccaggagagtctataagagaaacacattcaaattcctttatttgattctcttttaattagtcagtaaaacattttaaacatttttaatttagctcagtagaaacagcattcaagttattccccaaattctttaactgtaaattaagcactacttctttcaattgttagcctgcacttcactaaaattataaacagtctaaacataagtcttttttaaatataatgaaaatcttggctacatctcaaaatggaacaatgtggatgaacatcttacatggtttttgggcaactgggctggggtgctctgaagtttttctctcccttctccctcatgtgaatgctagccttccccttctctgtgcttcatgcccttccctttacatcccatctcaatagggagcctctattccactgttctttgcttatctgtcgttttatgtactgtgtgtactgtaggtctaagcccatgcttctcccacaaaaccaagctatgaaaaatcggaaggctactgtattattccttgtaggtccactccaagagcagtgctagatatgaagtaaactcttttaaaacgtttgttaaatatgggaatggataccaatgtaatggggacaatatcacagtctggttttcagggcatttgtgaaaatgaaagctgttaaggtgtgataagataaaatttaaaacaaatagcatgtttcctctcagcaacacaagctttagtaaatgattgagaaattgcactaagtcagaaattacaaaactgtcagacattgtgatctaacacatgcaattagtaagtgctggcattgcataaagtaaatctaaaactgcccagtctaatcacccatctattaagttctccttgtttggcctgggctttcatggggttaataaggactgtctatgtctcagacataaggagaaatgacaggaaagccaacagtagctgctgtctgccttggccttcctgcgatctaagcttaataaggtagacctgtctctgtgctctttggaggtgaaatgaagcaatggtctgatgagggccacaggaggcgccaggtcctgacaggctaaggtgtgacttgctgaatcctaaccatcccagacattttaggactagtaagtgtgtgatggccatgggaagtaactgtgtgcaaagcccacagagactaaggaaaagaaagggcaagggagattactggtcatctggtctctcagttcacatgcaaagcaaatgctgagcacaacagcaaacacaacctctgagcattatttctccaaagcgtatttaccaaatgctcattcgcttatctctgaagacttggttaaacatgcatttgtaatgttgtgtttctgactttcttgccttctgtttttgtaactgttgctgtttttatatttttcagcttttaaaaatatattacctgcttggacagtgtaactctgactctcaggaagaaataaggggaaagggaagaacacttcattaaaaaaagaaacaagaaaaagtattttcaatgaaaaggaactgtaactaagggtttataattatatactcaatatatattattatgtgtaatatattattaagtatagcatataattacatatatattaaatgttatatacacatataattatatgtgctattccccattttaaaatactaatatttagaaaagattaggcaattcttttaatttatggcttctttaagggtttttatgagactaggtcttactgtgtagccatgactggtctgcaactctttataggccaggctgaccttggtggttctggcctttaatttattccatttttacaatctacctttccttaaaataaaattttaaaaaagtgtcagtagtaatgttaaaattttcttattttgtgagtaaggcatacaatcatgtcaaaagatttgcatgtagtattatacctgattatcaagagaaatttaagttatttaaataaatataaatgatgaaatttttgtgtttttttcttgtggccatttcttttaacccagtcctttacttgcatgacttttgctcttactgactaggaattgtaatttgttcctttgtaaaggttcaggactagggacaaacttggaggataacagattctttaatatgtattatgaattatacacagacacaattaagcatccagtatataaaactgattgagctacataactttagaatggtaatatttatctttaaatatattacatacatctatttttttcacatattgaaatgaatcatagaagtacaaaacacacattaaaggaaaatttttctaaaaaaagaaaaatcctatgttttagaagttgtacatcgattgcagaattgaatgggaaatataaagaatttccatgtatcttctttcatggcagacacagaattcaagagctcacaacacaactttgttggatgtagtgtagcactaccatccatggaatgtggttcacactgacacacattttattctctgagtctctcaaaatgtggaatgatatgtgtccactgcaatgttacatggattgttttcatgcccccaaagttgcctgtgctctgactccttttctatctcaacaacttttggtgcccattagacattttactatctctgtaattttaccttttttcagaatattatatagttggcatcctactgtatgtttttaaattggtatttttcaccgaccatggtgtcatttacttttttttcatgcatagaaccaattggttcactacgttttgtttacacagtagcctttgcttgattatattgtctttattcctctcctgaataaagattagttgagtctgtgtgtacgtaaacctttggtttgttgttttttttttcccttgatggattccattcccaatgctcactgtaatgtgacttttgaagtttggtaatgcttagtcatccagttttgttcctgttgttgatgtgcaggttggaattctgggtcttttgcttctccacataaattttaaaaatagttttgaaatatccacaaaataacttgttaaaattttattattgtattgaacccatacacaaatgggtagctatacataaatagcatgagaatactaacttttcctatagcaacacgaaatatcccatttatttagttctttgctatttttcaaaggggttttctggctttcctcatatagattttagcaattttcctaatatgcagatgagtacttcatttttggaggatgctaacgttaaaatttttaaatttcagatttcacatattcattgtttatacataatgaaacaactaaactttatttatcaaccctatgtagtgtcatctggttataattgcttttcacacctagagttttgtatttttgtttttaatcaatgttatggcttattaataatcattgacttccatgttgaatgaatgacctcagataatgaggtaggaaataagtgaagaaatattttccctgcttttatcttccagaataatagtagaaaattgctaaaatatctttcttactaaacagtaaacattatcagtctactcatctaggtctggtgttttctatataaaagattatgcttcattgattcaatttcttaaataattgtaatcctaatcacattatttcttcttaacctaagcagatttagtcttttataaaattggctattctaggaaatcaaattttttggtattgaattgttcattatattcctttattatgtttttaatatacatgggaaactattataatgtgtcagttttcatttccatagtattaaattcttctctttaaatttattaaatttatcataaaacatgataaatttattatttattaaagcttgcctgaggattcaaaaagcaaagtcagccccagctatacaagctagacacacacttttttttttaagattcaaaaaaaattgttttctccccttatattgtacatgggcaagataatccagtataaggaacaggtccataagtgctagccaaagcattaggggcagcccctgctgccattgttaggagtcccacaagtagaccaagctacacaactgtcacatatacgtagagggcctaggtctgtcccctgcagactccctcgttgttagttaagactctataagttcctatgagccaggttagttatttctgtgggttttcctgtgatgtccttgatgctgctgtttcctccagtccctccctctcttcagaaggaatcccccagctcagcctaatctttggtgataggtctctggatctgtttctaagagttacaagatgaagactctgtgatgaccaatggggtagtcaccaatctgatcacaggatatccagttcaggctacatatccaccattgggttttgttgtgctgggaaatacccagtttataagcagtacttcagttcaggtgcattgtcagtatgatggcccatgttggagaattcactctgtgtaaaagccagaaaagaagaagagagatatgcgaaatacaacatagttttgcctgcaaacactatcttctgccaatattagcccaacagtgtgtaaggtcacccatcacccctatttactgtagactcttagaaccttccatagaaactgctctagatctgcaggaagaagagcagcttgctcagcagcctcaactcactgcagaaatttctcctcctttggactccacctcttctagtttgtgtccttattactgtgataaaacactaaaagcaacttgggggacatgaggatttatttggcttacaggttgcagtcaaacaccaagagtacacaagtcaggaactctaggcaaaaactaagacaggccacagaagaacagttgatttctggcttcctccatggcttgctcagctttccttccctcctttcttctttccttccttccttccttccttccttccttccttctttccttccttccttccttcctttcttttgctctcccccccattttttttatttaaattagaaacaagattgtttttcatgtcaatcccaggtccctcttcctcccctccttccctgacccctactaacaccctaccaatcccataccctttctgctccccaggtagggtgaggccttccataaggggtcttcagagtctgtcatatcctttgggatatggcctaggccctcctccatgtgtctaggctgagggagtatccctctatgtgaaatgggctcccaaagtctattcccatgctagggataagtactgatctactacaagaggccccatagatttccgaggcctcttcactgacacccacattcatgaggtctggatcagttccatgctggtttcccagtgatcagtctgggggccaagagctcacccttgttcaggtcagctgtttctgtgggtttcaccagcctggtcttaatcctttgctcatcagtcctccttctctgcaactggattccagttaagatcagtttttagttatgtctgtctgcttctacttccgtcagctactggatgaaggctctaggatggcatatgagttagtcatccatctcattatcaggggatgatatttaaggtagcctctccactgttgcttagatggttagttggtgtcatccttgtagctctctggacattttcctagtgcctgatttctctttaaacctatactggctccctttgtgatggtatctcttattttgctctcctctcttcttccccctacacaaacttcttgatcccttatgtcctcctcacccctcctcttctccacttctcattctcctagctccttctcccctcacccaatgctcccaatttgctcaggagatcttgtccctttcccctttgacacgggagcatgtatgactctgttagagtcctccttgttgcataacttctctagtgttgtggattgtaggctggtaatcttttgttctatggctaaaatccatatatgagtaagtacatacgatgtttgtctttttgtgactgtgttacctcgctcaagatggtttcttctagttccatccatttgcctgcgaatttcaaaattccattgtttattttttccgttgagtagtacaatattttgtagatacaccacattttctccatccattcttcacttgaaggacatctaggttgcttccaggttctggctattacaaaaatgctgttatgaacatagttggtcaggtgtccttgttctatgaatgtgtttttttgggcgggggatatgcctaagagtggaattgctggatcttgtggtagactgattcccattttcctgaggaatctccatactgatttccaaagtggctgtatgagttggcactcctaccatcagtggagaagtgttcacctttctctacatcctctctagcataagttatcattggcatttttgattttagccattctgccaggagaaagatggtattttagagttgttttgatttgcattcccctgatggcaaaggatgttgagcactttcttatgtgtctttcagccattttagattcctctattaagaattctctatttagttctgtaccctactttttaattggattatatggtgttttagaaactagcttcttgagttgtttgcaacttttggagatcagccatcagtcagatacggggttggtgaacattttttcccattctgtgggctgcgatttttcttgcggactttatcctttgccttacgaagtttctcaatttcaggaagtctcatttattaattgtcgatctcagtgtctgcactacaagtataatgttcaagaagctgtaccctgtaccaatttcttcaagggtacttccgctttctcttctaaaaagttcagtgtggctggatttatattgaggtctttcatccatttggatttaagttttgcacatggcgataaacatgcatctatgtgcagtcttctatgtgccagtatccaattatgccaccaccatttgttaaagatactttctttattccattgcatatttttaggttctttttcaaaaatcaggtgtttgtaagtatgtgtgttagtattaggattttcaatttgatttcattggtctacctgtctatttttgtgccagtaccaagctgttttcaggagtatagctctgaaatagagcttgaaatcagggatggtgatgcctcctgaaattcctttattgtacagggttgttttggctatcttgggtcttttgtttctccatataacgttgagcattgttctttcaacgtctgtgaagaattgtgctgggattttgatggggattgcattgaatctgcagattgcttttggcacaattgtcttttttttactatgttgatcctacctatcccagagcatgggagatctttccattttctggtatcttctttaatttctttctttaaagactcaaagttcgctgggcattggtggtgcatgccttttatcccagcactcaggaggcagaggcaggcagatgtctgtgagttcgaggccaggctggtctccagagcaagtgccaggataggctccaaagctgcacagagaaaccctgtctcaaaaaaaaaaaaaaagactcaaagttcttgctatccaggtctttcacttgtttggttagtgttaccccaagatattttatgttgtttgtggctattgtaaagggtgatgcttctctgatttctttctcagccctcttattgtatgtatatagtagggctactgatatttttgagttaatcttgtatcctgccacttcgttgactgtgtttatcagctgtaggagctccctggtagagtttttcgggtcacttatatacactatcatatcatctgcaaacagtgaaaatttgacctcttcctttccaattgtatctccttgatcttgtattgtcttattgctatagccagaacttcaaggacaatattgaagagatatggagagagtggacagccttgtcttgttcttgattttagaggactcacattgagtttctctccatttagtttgatattggatgttggtttacaatatattgttttcattatgttcaggtttgatcctgttaaccctgatttctccagaacctttattatgaatgggtgttggatattgtcaaaggctttttcagaatctagtgagatgatcatgtgttttttctttttcaatttgtttatatggtggattacattgatggattttcataagttgaaccaaccctgcatcccggggatgaagcttacttgatcacggtggatgatttttctgatatgttcttggattctatttgccagtattttattgagtgtttttgcatcaatgttcaggagggatattgctcttcacttctctttcttagttgtgtctttgtgtggcttggataccaaggtaagtatagccttgtaaaaagagtttggcaaagaaccttctgcttctattgtgtagaactaaatgaggagtattggtattagctcttgtttgaatttctggtagaattctgtactgaagcaatctggccctattttttttttccttgggagacttttgacaactgcttctatttccttggggttataggtctgtttaggttgcttatctgtttttgactcaatttagataagtgatatttgtccagaaaattgtccatttcctttaaattttccaattttgtggagttcaggttttcaaagtatgacctggagattctctggatttccccagtgtcccttgttatgtcccccttttcatttctgattttgtttatttgcctgttctctctctgccttttggtttgtttagataaaggtttgtctatcttcttgattttcttgaagaaccaattcttagttacattaatcctttgtattgttttctttgttttgactttattgatttttgcactcagtttgattatttcctggcatctactcctctggggtgaatttgcttccatttgttctagagctttcagttgtgatatcaacactctggtgtaactattcttagtttcttcatatgagcacttagagctatgaacttttgtcttagtactgctttcaaagtgtcccataagtttgggtatgttgtgtattcattgtgtattttattgaatagtaggaagtctttaatttctttttttacttcttcattaacccaggaatcgtgaaattgcctgttgttcaatttccatgagttgggacattttctgcaatttgtgttgttcttgaattttaactttaaagcatggtggtctgataacaggaattggaataacaggggattattccaatgtttttgtatctgttgaggtttgctatgttaccgagtatgtgctctatttttagagatagttccatgtggtgctgaaaagaaggtatattcttttgtgtttggatggaatgttctatagatgtctgttaatcccaattggaacataacttctgttagttcctttgtctctttgttaagtttctgtctggtggtcctgtcctatggtaagagtggagtgttgaagtctcccactatgtctgtgtgaggttttatttgtgatttgagttttaataatgtttcttttacgaacgttggtgcctttgtatttggggcatagatgcttagaattgagacatcttcctgatggatttttcctgtgacgaatgtgaaatgaccttcttcatctcttttgattgattgattttagtttgaagtttaatttgttagatactaggataactaccccagcttgttttatgggtttgatttgaatatcttataccaatcctttactctgagataatgtctgtctttgaagttgaggtgtgtttcttgtatgcagcagaaggatggattctgtctttgtattcattctgttagcctgtgtctttttataggcaagttaagaccattaatattgagggaaattaaggaccattgagtgcttattcttgtttgttttttatttgttgttggtattgtatgtggatttaccctgatttttcttttggcttttggtaaagtgggattatctattacccatgtttttgagtgaagttaacttccttaggttggagtattccttccagtactttttgtagggctggattagtggatacatattgtttaaatctggttttgtagtggaatatcttgttttcttcaattacaatgattgaaagctttgctgggtatagtagtctgggctggcatctgtgttctcttagagttggtaaatatctatccaggtccttctggctttcagagtttccatagagaagtctggcgtaattctaataggtttgcctttatatgtttcttggcctttttcctttgctgctcttaatattctttctttactctatatttggtgttttaattattatgtgatgagaggtctttttggtggtacactctatttgttgttccgtaggcttcttgtactttcattggcatgtctttctttaggttgggaaacttttctatgattttgttgaatatgttttctacacctttgagttggggttcttcaccttcttctataaccactatccttaggtttggccttttcacagtgtcccatatttcctagatattttgtgttaagaatttgttggacttaagattgtctttggttggtgaagttatttcctgtagtttatcatcagtgtctgagattctgtcttccatctcttgtattctgtgggttatgcttgcatctgtggttcctgattatttactcatcttttctatttccagcattccctcagtttgtgttttctttattgtctccatttcagttttcaggtcttgaactgtctgaattgtttccttcagctgtttgcttgtatttttggctttccttaaagatttgatgatctcttgcttcttttggtttgtcttttcttccatttctctgaaggatttactcatttcttctcttaggatctttatcatctgtgtgaagttgtttctaaggttgctgtcttctgcttcatctgtgttgggatgttcaggtcttgctggaatagtctctaaactctggtggcatcatgttggtttttctgttgttgtatgtgttcttatattgtctcttcttccagtgggtacaggtggtgtcaattcctttcctggtatgcatgggtccaatgttctcttccggggggtggggggcaagagggactaatactctgatgggtcttaaggtgtgtgggggtgggtctgaggcactctctctctccaggtgaaggggagcagaactagcacagagatgtcagcagattcagaatttcttggtcctcggggcctgagtcaacctgcctgcagtccccaggatgggagttctcagagtgggcaggcagaagttgggcccaaggcaggggccagaagcagctcacctctgccctgagtgggggctggagtatcccagtgatctcagcagactcagggttgcttgtcctctgagactgaattgacctgcctgcagaccccaggacaggagttcctagagtgccctcagcttgctttcttataatacccaggcctacctgtccagggctagcacttcaaataatgggatggaccttcctacatcaattagcagttaagaaaataggtccccacacatgcctataggttaatccaatggaaatattttctcaaatgaggttcactcttctcagggatgttgagttttatttttcaactgttcccacttttaattttgccggaattacatccttttatatatgcaatctttgtaaccagctgttacgtattatctaatagattcatactctgttccatagatatatctaattaaattttcccttctttgaaaagtttttaatgtatttgttaacacattatcaatattgtgattaatattttaattggaaggtctttataaaaaatcatttatatgtgaaatttgggggtgggggaatatgtacttcattcctaccaagttatatttaaatcttacagatatgtgccctgtaaagatatttatcttctatataacttctctggaacttatctttcagcatgtagagcaaacaattccctgagtgacagtttggttatacacttgatccccttgcttccccgttagtcacctcccctccacttccttttttcttacttcccacttctccctcctctcccctcccctcccttcctttcctttcactcttttaatctctcatcttgtcatggtgataaaacaaaataagtacaggctggagagatggctctgccattaacagcgtctactacttttgcacaggacctcagggattctgttcctgcatcagatactcacagccacctgttccactgatccgaggcctccttcctgtctccacatccacatgtgagacacatataagcaaaaataaaaataagttgaaaaaatgtattccttatattattatacatgtatttcaggagctgaaattctaactaaagtgtttctggggagagattttgttgagtgtgggtagagataagaacatctgggctagagcctaaaggaaatggcaaggacgttaacattcccatgaatggaacccatcagctcataagaaattaattcacaatttcttaggctagaaaaacatatttgaattaaatatattctttctcaagagatataaaatgtaaaaccttaaaaccatctgtcctcttacagaaagtttgaaagtttaacttaggtatttcaaaataaaatgtctagcgtgttattgcgttgccaggcaacactggtaatctgagatctcacaaccaagtgccagcaaaatgttggatgcagtgaatgtgtctccaaagcaagtgagtcagcaacagctatttcaagaagtgcttgaaggagccacaaaaatccccagtgaggatgaaaccatcttcaaaccttgctgcttctcttttgcaatgcaaacgctcatacctcctctcactggccttcaagtgagatatagtcaaagagtcaagatgtattctggtccatcctaccgaggaggaactaacagtgaagccagcacatcacttcagtgcactgagactgggggatcacacccttatccccagggcagaagcccatggtcaaaacctcccagctggaagacaggtgtctcttcaggatcacttcagactccagagcaggaggaggaagagaaagcatgcctgtgttcctgtacctggaaatgttccatgtaaatttaagaatcatatttccttcttgtacaaatgccagtttcacttgtagtgggccctggctttgtttgtacctttgttttgtcctcaaagaactgctttgaaaaagaatccgttgaagacaagaagttttctttctctgtttcatatgcctatatagaactcttgtggatcataagaaacttacacaaactgagatttgtgcctctgccctacacaggaagatgtgtttgtctaagagactagaacctccagacttgattccttacaaagttaagacagatgactgacagagacaaatgaccctaacaaactctgactttgaacctgccgagagtgaagctgaacatggatgactgaatttatatttgcgcattggttgaaacataatttttatttggtggaatgaatatagttttttgaactgttattgagtgaagatgtgagaaccagctaaatttctagctcagagagttttgaaggatcagatatcaagcaaagaagatctgttctctgtcacaaggactaaattaaatgtggcacatatttcaggtttttaatttctcagaaggtaggaccattaatattttaaatagatttttccttgatatatatagttaattactatgtcggcaagctgtattatttggtctacttaaaaatataggtgtgcaccttgcttacccagatgagggaattttttttttttttactttgttactgttgataatgttatgtcaaattctagatgtagtttagcagcctaagtatcttctgtggctactggagaatattcggtataaattttagtattacagaaatgcttaggtagagatgctatgtgagttacttatgttattcaggataaaacatatttaatgctacactgatggatacacttggtattataaaggtcatgcagttttcaagttgtttggaaattctttttatttttttaactgctagttactacgactaaattattctttctttttgtgtaataactttataacactacataatggtctaaaatcagtacctgataattctagagaaatgggctcattaaaaatactcagttttagatgcatatgattaacttcctttcagttttgttattacattacaaaatatccttttttccagtaataattttatggtctttgtattttagaccatagttatttgttttaaagaggaaatatatgtaaaatgccatatgtagaatgttatttgtaaaacacatatcgcacaaaatgccaattcattttgtattacacataagaataaaatattaatatctaaatctaaagatataattgtttcattttcttggatgtttctgataatccaatagttatttaacaattaacagataagtttgtctgtcatgatttggtataacagatgatgaaccgtgtattttggcagtattttgttgccatatagatgggttcatttttttttaaatacatctaaatatagttcttagttatgcactatttagttaaacagcagtttcaaaacattttattttatttggaaaaccgtatttttgttttataacacagttgttttaaaaaatatggggcaaattctacgttttgtcatgatgaaatctttgcatttgatcatcttttcttttctttgaattctgtaaataacattctatgagaaaataaggaacttgaaagtagtttaagacatctgagggagaatcatacttctgtaaaatcaaatatccattctgggtttcagaaatttgttttggcaacttatgctttaacttaacttatgctttaaaaatataactgctctaaattcacagaacttttaaccactatccccattctgatatgcattgcattaaaagaaaagtaacttaaaaataacatttagtaattaagaaaattgttcctcaaagcctatttaaaaattgaccttagttaaatgatgactgtcacctacaggcaaaccatagattctgaggactgtatgctttcactggtctatgtttctacttcattatcattcactaatacttagatttttgtcttgtttggattgactaaaataacaaacctgagatttggggatataagactgtggacaaaaaacatgtgtagatccatgttacctcacagtgaaacatatacctttaatccagtggtcaacaacctttctaaagcttcaatactttaatatagttcctcatgttgtggagacccccatgcataaaattattttcattgctactgcataactataattttcctactactgtgattcataatgcaaatatatctgatatgtgacatcctggaaagggttgttcgaccacccaaagtgggtcatgattcacaggttgagaagcactactttaataacttagaaaccctcagtgaatggtgcagaagtttgaaagcacagtatttggagcagattgcttctgtgtttgttgcttataaaaggcacaggatcctagaagtgtcactatttccatttgtgcttcaatttctaatatataaaatgggaatagagaattctcaatagaggagtctaaaatggctgatagacacttaagaaagtgctcaacatccttagccatcagggaaatgaagatcaaaacaattctgagataccatcttactcctggcagaatggctaaaatgaaaaacaccaacaacagtttatgctggagaggatatggagaaaggggaatacttctccactgctggtgggagtgctaacttgtacagccactttggaaatcagtatggcaattcctcaggaaaacgggaatcagtctaccacaagatccagcaattccactcttaggcatatccccccctcaaaaaaaaaaaaaaacacaaggacatctgttcaaatatgttcatagcagcattatttgtaatagccagaacgtggaagcaacctagatgtccctcaactgaagaatggatggagaaatgtggtacatttacaaaatggagtactactcagcagaaaaaataaacaatggaatttcgaaattcgcaggcaaatggatggaactagaagaaaccatcttgagcaaggtaacacagtcacaaaaagacaagcatggtatgtactcactcatatattgatttttagacataaagcaaaggattaccagcctacaatccatactaccagagaagctaggaaacaaggaggacccgaagagagacatacatggtcccccagagaaggggaatagaacaagatctcctaagtaaattgggagcatgggggaggggaagggagctaggagaaagagaaggggagaggaggacatgagggagcaggaaggttgagatgggggaagactagaagagagcaagataagagataccataatagagggggccattataggtttaaagagaaatctggcacaaaggaaatttccagatatctataaggatgacactaactaacaatctaagcaatagtggagaggctaccttaaatgcccttctccaataatgagattgatgacgaccttgtatgccatcctagagccttcatccagtagctgatggaagcaaaagcagacacccatagctaaacactgggccaaactcttggaatgaagttgcagagagggaggaatgatgaacaaaggggtcaagaccaggctggtgaaacccacagaaacagctgacctgaacaagagggagctcgtggaccccagactgatagctgggaaaccagcataggactgatccaggcccttgaacatagatgtcagtgaggaggcctcagcaatctatgaagcctctggtagtagatcagtatttatccctagcataggaatggaatttgggagcccattccacatagagggttactttctcagcctatacacattcgggagggcctgggccctgctccaaatgatatgacagactttgaagatcccccatggaaaggcctcaccctccctggggagcagaaaggggatgagataaggtgttagtgggggggggcagggaaggaggggagcgagagggaactgggattgacatgtaaaacaagcttgtttctataaataaataaataaataaataaataaataaataaatggaaaaaaataaaatgggaataccagaaatagcttcttcaggtatcaaaagagtttaaatatttaagtatttaaatatttaggcagagcatctatctagtgctcagtgagacctaaaacgatatatgccagtttgtttacagctcttcacttagcacatttctgtgcatttatagggatgtttaaagtacctttcaatagctgtcaagacaccacagtgagaaacatacagtattactatccaatttgctttcagctgattttgtcacggtgtatgtgtgcatgtgttcatatgtacctacatctgtatgtgcattgtgcctgagtgtatgtatgaagaacagaagtagttattgaatctctttccatcttactttttgtcttggtttctcatggaaactggcactcaatgattggctagccttgctggatctccacctttcctttccaaaacctactttacaagcatgaactgctttgcccagctttttacattggtatgagggatctcaaatgcctatatggaagatactttaccaactaaaccatctctttcacatctatattgactttattttatacaaattttgcatttttggtatgactacagtctttatagatactgatttaactattatcaaatctctattaaattattattttggaaagtaacaataattttaaaaaatttttcttatctgtaaagaaaataatagcagtaactgtcataggattattgtgtagaataattgttccgcataagtcttaggtgtcactatcatcatcatcatctatatatgaagtctaaagtttcaactcagaggtaacaaatacacaatgaatgcttaaaataaaggagacaccataatgcaaggaagactacaaaaaaaaaaaccaaaaaaaaaaaaggaaaaaaataccttcaaagaccatacggaatgctaagtatcatctattttcaatgttcaccattacaggcactacttatgtcactgatcatgaaggaagagcgacttagagacatggctgtaacaagggaattcagatccccataaagaggaagtaagcagctccccccttttaaatttaaattagaaacaagctcttttacatgtcaattccagtccagtctccctcccctcctcctttcccacccccaccaacccccctatctcatcccctttctgctccccagggagtgtgaggccttccatgggggaatcctcaaagtcatatcatttggagcagggcctaggccctctcccatatgtctaggctgagaaagtatccctctatgtggaatgggctcccaaagtccatttatgtactagggataaattcactgccagaggccccatagatagcccacacctcctaactgacacccatgatcagtcctatactggtttcccagctatcagtctccaatctatgtgctcccccttgttcaggtcagtagtttctatggttctcaccagcctgttcttgaccactttgttcatcactccttccattctgcaactggattccaggagttcagctcagtacaagcagcttttcaactaatagtcaataagataattttggatatcaatcacaatttggaaaaattgccaagaatcaaaacttgtgccatagagattttctgttgggttaaagaagtcctttatttaaggtgacatctgaactgtctcctaaatactagaagttattgtgaatctaaaatataccaactgccaaaaataagcaaaggaaacaatgtcatgtatgtccttaaggccaaaagaatacaaaatagtagaacgtggcaaaacatgtcagtcatagtaatatatgaatgggcctttttttttttaacccactaaagacaaatttttatagtaactcacgaaacagaaagttccatattgtatatatgacatttgcagtgaccaatacaattatcaaattggcagacctagactcacctgggagataagtgcctgggcatacctgtgaggatgatcttcttatgctaattgaagggggcagggagacagagaaagggagagatctttacatttgaacttagctcatttcttatttttaaattgtttacatgaaattgtgagattaaagcttttagcaatgcaactattttctgagattgagccttcaataaggcaaggaagctcacacagatagagtcctgatttagtaagactgatttgcttaaaaggtgaagaagagacatcaatcatgacttggcaaaacagaaaagaccttggaagacagaaaggctttctgtaaggataaagacctaaccgaaaatcagtctacaagcaccccaatcttggatttctagccttcagaattggcagaaaataaaattctggtatttaaatattagtgtgatgtcctttgctagggcagctgcagtaggttaacacaccatacacacacacacacacacacacacacacacacacacacacacacacaccctgaagtaagagcaacaagttaaatagaatcataagaaagatagtcaagtctaggacatgcatattttacagatctggctccttcattaggtgcttgtcacaaaggtaacatataaggaatgcgtgaccctctttaggatcttggtttggggacatttgagaaaactgaaaagatttgagtattaactaggtgttagaccacagtatattaattttggtagctttataaaaatctatgtagaaaataaattatcatgaaagataatgaggtgtctctatttggtacttcatataatcaaatgacttttactgtttagaaatagattgagtacaaagaatagaatctagaaaggttcttctggcttacacttctaccttgctattcctcattctaggaagtcaggaaggaactcaaataaggtaggaacctgaagccaggagctgatgcagagaccatggagggatattgcttattggcttgcttaccatggcttgcccagcctgatttcttattgaacccagtactaccagagcagaggtggaaccacttacaatgggtaggccctcctccatcaatcactaagaaaatgccttacagtcccgtcttatggaggcattttttcagttaaattttcctcctttcaaatgcctctagtttgtgagtcaagttgacataagactagccagcatatgtctgtagcatgaataatataaacccagagacagccattggggttaaagcactagagaggtatataaggcaggagcagggtctcagcattcagtctccagcaatgtggagtgaatctgaggagcagtgcagtcagaagctcagtgcattctgaggattgacccttatgtgtgagcattggtagaagtgagaactctctagtagctggccactttatttctctagtcctagaattaaaggcatgagctgtgtttctcttttaaactggctcactctcacatagctctgggtgcccttgaaatcacagagttccatctgcctctgtctcctgagtcctgggattaaagatttgtgtcaccactggctggcctctatggctgtggctatcattgcactctggtctccaggcaagcttcattagatcataaaaaatatatcaccacagacatcatgtccctccttcctatgaacacactcaaaaggaccaaacaaaaacagttgttagtgacattggactagcatttaagaaatggaaattccatgggtttcatcagcctggtctggacccctttgctcatcactcatccttctctgcaactggattccagttcagttcagtgattagttgtgggtgtctgcttctccttccaccagctgctggatgaaggcaaataagtcagtcatcaatctcattatcaggggagggcatttaaggtagcctctcctctgttgcttagattgttagttggtgtcatctttgtagatctccagacatttctctagtgcctgagttctctttgaacctaaaatgtctccctctattatggtatctcctttcttgttttcttctgttcttcccctgactcaacccatctgctccctcatgtcctccttacccctcctcttctccccttctcattctcctagctccctcccccctctccccaagctcccaatttgctcagttggtcttgtccctgacctgaacaacagggggctcttggtccccagactgataactgggaaaccagcatcagtgaggagacctcagaaatctatggggactcctgtagtagatcagtatttatccctagcataggtgtggactttgggagcccattccacatagagggatactccctgagccaaaacacacgtggggttgagcctaggtcctataccaaaggatatgatagactctaatgaccccttatggaaggcctcaccttccctggggagcagaaaggatatgttataggtagggtttttgttgggggggggtaggcgtggaggggagggaaaggaaactgggattgacatgtaaaacaattttgtttctaattcaaataaaaagatctacccccccccaaaagagaaagaaatggaacttctgcacttaacagctatatacaccagataaaatacaaaacaactagcacagggatccaacagacaaaaccacaaaggtaatggaagaggttcattgcacagatgcaatgaacactgatgaacacagtctagcaaatccactccaaatttgccaggcagccactgttgtagtagaaggcgaatggaccagctaagatccaagaaaaagcaggctggattccatcctagaggaatgggaaagacatcacagcaatcggggtcattagatttgttggtggcagaaaaaaatgccacaaacaaagccagaagggtggaggaattctgtgtattagccttgccctgctctcccattgatctctgatctgtgcctgcttggagaacactgaaaagaagcctaagtgagatctgagctgttcctcagtcaaatgggagggtgtgatgtgatttaggtcaaggtaacttcctggtatgatataagaagaatcaaatcacaccagatagaagtagaagagaacacatcccacacagcacaacacagtagaaatctacaaaccattgaggtctcctataaaccactgaaggtgtcattgtttcagtcctggtatggaatgagtgttctgggagagaatattcctgggttgttcagtttctggagcctctaggtggtgttttatatttatcccaaatgtttagagttaaatataggtgttcaatttcgtatgtaggcacaaatttcagcagggaaatttgctattgggttttcatgttagacatttgacatttaaggaatgtgtgatcctttcttaacacattctttatccatatcagttttctttgaggtagaaaactgtcttgcccagcagaacactgtcaaacattggaatctgtgctctgtaaaactgcaatactgtgtcctgttcttaattaatcttcctgaaaggaaatatgcctttgtgattatgaaatatgactgagtgattattacatccttttatgtaaaatcctaacagacaattgctccatatttaaacagtgcaaagggtttttcccctagaagaactggggtggggggtgaggctagggaatacactgcacatttcaaagtcatttttagtttcaagttagcattttattaatcagtggagccacctgatttgagagcattcattgttttagtttaagaaacctatttcatatttggctttgcaaatctttatatagtttaagcagctaagggcttattgactttaaagatttaattatacctttgctgacaattctgaggcaggcacagatgagcacccaggactccagatatccaatcctaagtgttttctctctctctctctctctctggagtctgttgccttctctaatgtggatagaccagattcaaggaaactttgttttctaaactgaaaaaaattcttttgacattgatgtaagacaaaatgaaaatagtaaagcacaaataatcattagtgctctttcctttgcatatgtaactcataggaaatttcaagaactggagcacctgttgaagacagggacctgagtccaagtgccacattctggccacttgatgacacattcagtaactcagacccttttgatagtttttctgatgagtgcccagccattctgatcagcactgtttctttactatttcacaaggttatggctcctaatgatgttggaggatgctgctttaagttcagattatacgtgttgatgtttcctgtgtctaatccagctggactcagatccaaaagagctgttgcaaggggagaggggagtgacagatattaatcaatggaccaaatctaccaaacatttctaaaaatgtttcccagtgtttgcttcattttaattttttaaattgcttttgagctcatctttgtttatgttactaatattttcctcccttttaaactcattcctccccaaattactaagaactctggttcccactattgagtttacaggagttaacatgatttttacaatgtaattgtttaattattactgtgatttaaaccaaacaccatagatccaatcaattttgtaattttcccatttggctgactctactaaaaatcaggatttgatataatgtaaaattttctaattctagagtctgattttaaccatgtttttaaagatgttggagattgtagaatatgtcaaaacaaagtttattttcagttttccatcactagagtttcaggaagcaacagggatgccctgtcaaagacgaaccagtttccagctccaggagttcagcttggagataagttcatactgcctgcaagtactaaaggaagcttagtctctccttactcaaatgtattttctatttatgaatatgagtgtttcactcagcagtcatgaaagaaacttttgagaagattacaactgatcctaaacctgatgccattactggtttatattcccaacaaatgtaggctgaaactttgcacgttcttttacttaatgtttcctagtaataatttgtgtacgtaaaacactgaccgagaaaaattttttcttcatttctaaaggaaattcagagaagcttcctcctccaccatatggtaacaagtgttttcaactaaaatactcaatgttagtttatatggctaataaataaaattccaaaattatttgatgctattctaaagtcaagttttattaatccaggttatcttggaatttattatgtattccaaaatgacctcaaactgattatccttctgcctcagtttccctggtttaccacacctaatttctaggatctgtctattaacaggcaatggaaagatccagagtacaactgttcaagtgcttaaaatgttaaagattttctgactgaatatgaattaatatagtaagtcaagagtgagtaaaaatatagatcaagatctatatagaagcctatcctaaggtctagggagattggtgagtcgctaaaatgcttgctatgcaagcatgaagacctgagttcagatccctggcagccacagaaaacaagggcatggaaatgcacctctgtaatccaggtgcagtggaagaaaaataggcagatgcatggagctaattgggtagccagcttcactaaattagtgagcttaagccaggtggtggcagtgtatgcctttaatcccagtacttgtgaggcagaggcaggtggatctcagtgagtttgaagtcagcctggtctacagagtgaatcccacaacagcaatagagaaaccctgtctcaaaaaaaaaaaaaaaaaagaaaaagaaaagaaaaaaagaaaaaagttcaaggttcaggaaagagactttgtcatggaaataagatggagagtgactgagaaaaacacatgaacttaacctcaagcctgcactcacatggacagcatgtttagatataactttatgcaatttcacatgaaaatacagaagcacattgtcacatatatgaacacacacacacacacacacacacacacacacacacaaacacacacaatttctattaagattgtagcaggcaaaaataaaaaggcttacaaatttcagattttataaaccacaaagtatttcttttagaaatgaagaaaaatttgtttttatgcctgtgtttaacatacacaacttgttaccaagaaacattaagtaaagtaatatgtaaagtttagggctccatttgttatgaatacaaaccaataatgccatcaggtgaatgatcaattgtaatcttctcaaaaagttcttttgtgacttatactataacttcaaaatctgtgtgctgtgatatttccttctgtttgctgtgaatatgtgttgtttttattggttgataaataaagctgttttggccaatggccagtcagaatatagctaggtgggaaatccaaccagagttatggagaaaaagaaggctgagtcagggagatgccatgagttggtggaaaagcaacatgtgaggtaacaatccacaaaccacatggtaaaatacagaataataaaaatgggttaatttaattgtgagagctagtcagtaatatgcccagtcattggccaaaaaaattgaaattaatgtaaagccttagtgtgattatttgggaagtggcaagtggactaaggaacgtccaactacatgagatacccaacaaagggtaccacaagttctaataggtctcaatcataaaatcccagagtcagatatagtggggaaatgccgaaagatcagagagacaaagaagtaaaaccacagccaccttacctactcagcttaacagctgaaaagagattgaggtcctgtctcctcctgccttatcacttcctctctctgcccagatatatcacttcctgtctgtctgtacagacctccagacctctatgattaactagtggttagctccatccactgatcttcaggcaagctttatttgttagataaacaaaatatcagtacatctttgtcccctcaagagttagatattgaaccataagtcccaatagagggcctgtgggaggttccctaatacaaggacttgagttttgattttcctgattaatttcttttaacatttgaagatgcagaacaaatccacattagatactgaatctgctatttctatgttgtctcacttctctgcctctaggactcagagtatacttctgttgtttgtaaattatccactctgagttattttgttgtacaaaaccaggctatgacaactgaatttttcaaacatgtgacatcaccaagtcctcagtgttctaaggcataagaacatatcagggaagcatagaaattccatgaatttgagggaagactgatggctagattgaggcaggaataactatgtcacttcaaacactaggtgatgggaacttccctccagctctgtctcagggtgcctgacttcatattcaattgtcatattgggaatgatgggaagaccatacagaaatgtttcatttaagacacagcacttgaattgcagttccagccaccattcaactcctggcatgtgagtaaataagactttagatgcttctaactcctaacctttgactattcttgctggcctcaaaacaccacagaactgagaaaagctgacatcattgtgtcttgatgaactttatgacaagtccaaggcagatcccaaattatgttgccctttaagctactgagttttacagcaattaactgtgcaagttaaaattaagtcttaggaaacagtcaccactggtgagttgtgtgctgggagtgctggccaatcagaaaaataccctggggattcatgagtatataaggattcaaataagagcagtggtgactttgtataactgttcaagctatttatcagttgggaggatatttgtatttttccttcactaagtagagtatagatattatggactgtttgtagtgaaacacatttctttcttcttctctttttcttgagccaatgagtttattggggttgcttacacaagtgagtgttattcacagtaacatgggttagtgtctgacaactgcatcataaaaaatctactgaaagatgggtaataactcacaaaacctgtatccctggctttcctttcctcacatatagaaaattctgatgaagagcattctctttcatagttaccttttctcatcctccaaccaatgtgtgtgttgtcttcagcagaaatgacttactagttctagtatataagtaacagctgtatcaaaagcctttagattttgtggggcctcaggcacttctctggacaattcacaggaacgtaacatagtcctgccactgacattttttgttcagtaacttcatggtttctgagtgtgttgctgtctgccttctcaatataaaatcctgagatgctgctttcattattctcctagatgcttttgaaaatctgcatgataatcaagagtctgcatcacataattaaactttcaacagagagtgggaaggtactttcatggcccactggtcttgactgtatccacaaattctgctcttatatttgtagttaaaatattttctaatcatcactggattttcccttccctgctttcctgtcagttcaacagcaagtaatttaaagcatattactgattttaaaacatccatagtattctagctattttgttattcagttttaggtttataacatattgctagcaaaacattaatttcagtacctagtgacatgtattttgataaatattcaataaaagaatccatgatgttgatagaattcaccagtgagcccttctaatatgtaaaatgtctattattgatttaatttctttaatatatacatgtattgaacattttcagatgtcatactcttatagaaagtgaacctgaattgaacaaggaaaaattttcaataaataaagttggagatcaacaaagtcaacaatttaaatataaactggtattaaagaatgtacacatatgtgtatacagttgcatatacatacatatttatataagttacattaaatgcaaaaccatggttcaaaaatacaaagcatttatcaaaatacatttctaatgagaaaggttggtcatgctatgtgttagaatagaagagggatgtctcctctcttagaggctttttgagagagacagagagagggggaacagacagacacacagacatagagagaggtaaattattcatgaaaatggttgtgtgagaaggcaagaagtaagggggtttgaggactagttccaggtagaagagattcctcacacttgagatctaaaggtaccataaaacatatttttatgtatgatgaataggtcttcctggtagttttattttctcttcatgttatttgattacatgaagaaagtactagaactatgggaaagcagtaaacctttgggaaatgatgaaaagagatgaattagggtcagatacacaagtatggaagactagattgccccttcgtccctttatgactggggaatttctatcctggaacacacatttctaatctctctctctctctctctctctctctctctctctctctctctctctgactatgacacatatgatagtgttttcaaacatgtagtttatttgcctttaattaagctgtaaaattggcctcacaaaaactcataaccatcttgtactttgagttgctttagtcaagaaagtgtcagcaatggcttattgttttgtctccagttcagatttgacctggagacaaattgctgcctttgcctcgccttagataagatcaaagcactctcatagaaggaagtacagaatggttttctggaactctctatagtttgggcttgactgatcccagaagaatttgggtaagtcacagtgcttcctgctcctgttagccatgcaactcctgttatcaaataaccatctgctttaatataaaacctcaaactgcacagagggaaccagcctgtacctattactgtcttcacgctgcagggtacacttcgttccttcttagcagtttttgcacacatcacaccatatccagggcagatttgctttctcaaaatccagttgtctgtttccttcattgttaaagtgtagataatcttggggaaattattcaaactctgtagagaggctatggattttggaaaacattttgaagcctgctgtgatttcctattcttttggtggttatgaaattgagtaaaggccaatgagtgccatgcatttcttaataagtaagggattttatttatctaacttcatagttcaatattataatatgactttgaaagtaggacaaaaataaaaaacaagatgttctttcttaaatgtctgttattgtgaatcacaatctacctgcctagaatctggctggtagtatgagtcttaggtacaaacagacttggtgtggaaagcctcctgtacaccctgctcctcactgaggtgactcagtctaagaaggaaagctatttctgaaattcaggagcttttgcaataccctcctactgtggaaagctagcatgtcactggcagctaggatacagtgttccccttctgaacataatttcaggaaaagacaaatgcagacaaagccactcagactttgatggaacaaaacaataaccagagtgctttgtaatcatgtcctaacatacaaaagcaagcacattatccaaaccacaaaaaagactaaataccttttcattaattatagttctggctgcactccaatctttcctactgcctagaaaataacgattaaatagcctagtcatagaattgcctctacttcctggtcataccagtcaattcagaacaaaaacacagcttctttgaaatctacttaatgttgctaaaggtaaattccaagtcctcaacacccatttattgtcactgtttttgtttgctcgaatgctttgttatagctaggagttgatggtttccatcatgagaacaactgtgctctgttacagttctagagatcttgaactggagtgatctgatccgtctattgggatgagctcactgtaaggcagccatgtacaaaggacagagtcagcagcagcaacttttctaagcataggagaaagagtggcctggagaggggggaacaaaacaccacccaaaacaacttttgatgagaggaattgagaattaatagtcatgaatcataagaagagcctgggagttggtggctaaggaatagaagataatcacccatggatgatttctctaaccgctcattcaactagaatttacagagggtcaaatatgaacctggcatagggaacccaggatgcactgacagacacaggaatcactcgtctttccttcagtatttctatgtgctacccaccccagtattatgcagtataactacagagttagaaagtatcactgtgtctggtgctgttgataaatgagggtctgagaaaacatgctaaagaagaaaggacagtgatgatctccctgggcaaagagactttggaataagagctgaagaatgagaactgagtaaagagacaggatcccacaaaatagaacaaaagaaaccacctggtaaccaggttgaccaggtcaggagtgttctgagcccaaaccaggcaaaacagtacaagaaactgtacatccatgtcggcgataaatactaaagcaaacttctcagccatgagttagtaatgtaatgaaaatagaacagtaaaatattataggccactctaaattaggatttgtcactgtattgtaagaaacagtcaacatattaaaaacagtcaacataataccccatattgacagagtgaaaaaaacgattagagtggaaaaggcatttatggttaattctttcttctgctaaaacctatcaacacattgaaaataagatcagctgggtgctggtggtgtacgcctttaatcctatcacttgagagacagaggcagttggatctcagtgagtttcaggccagcctggactacatactgagttccaggacagggaggactgttacacagagaaaccctgtctcgaaaaaccaaaccaaaccaactaaacaaaagaacataattcaatgtgttaagtgtcatatacacaaatattgtaactgtcatcacattcactagtgaaagactgaaaattctcccactaagatgaggatcaaaatatgaatgacttttttgtccagtctgagcaaaatttctagtaagaaacaagtagaaaagcctttgaattctaaatgaagaagaatcaactgctactaatgtgtattcatgtgtatatgaaaatatctgtacaggttctaaactgttagaactaatagtaaacttccaaactattagaagtaatcataaattcagttagcaacagtatgaaaagtcagcagggaaatatcaactgtgttcctgtgtactgacagatactcaaaaaagattaggaaaataattcagtatgaaatagcataatcaacaaaacctatataagagtaaacctaatagaaaggaaaaaaatgtgtgctaaaaatgacaaaatcttgctaatggaaatttaaaagaacataaatgtaggacaatatatgtcaattaactcaaactacataaaaaacttacacataagagatgaaccttacataaatgtgtgaatgtgtgtgtgtgtgtgtgtgtgtgtgtgtgtgtgtgtgtgtgtgtgtgtgtgtgtgtgtgtttgtgtatgtgtgagtgtgtgtgtgttggggaaaataacataagattggatttagcaataacgtcttttttatgattccagaagatcagagtatggaagagaaatgtaagttgtccatgtttttctggaatagttcgtagacattttattttgcatatcatgtattgatcggatattagtccatgcaagcatttttatatcttcatgattcaatataggtcatactaattttagaatttttttgttactacatttagattatcaaaaaatttggcctatgcaactcacataccatttctgcaatacttttatatcctagtcacaccattttggaagtttttttttctattggctattaggtttcctttacacagggactggccaatgttgcctttcatatctaagctaagttgtacttatacagatactgggcacacgtcctctctgaagtattggatcaccaatgataaagttatatatcaagaagttggtggttggggcagaaacaatttagcagtttgagaaatactcaagtgataaaataacagatgaatggatacaggaatatttttgttttttgtttagtggtatagctcaaattcttaagagagtgcaattggcataaacatgatagttgataaatttcattactatcatagattactgcatataaaaagacaagaggcttgaaggaaagagattaatttctttctattaaggtcataaattttgacattgagtagtggaggaaaaacagtttttaagaaccgaggcactcaatactctgaagaatgggaaaccttgacctgaaatttctgaatatattcagaaaaacaaccctgctgaggaatcaaggttatgcgtgtgggatgagaagagtgacacaatggacattcattcagctgtaaagtacactttggctgatgagagattaagcttctgacagagccacatagttgagggaccttcagagacagattagagttcaggaaatagggcagccttgaagacctttctttttgtagagttgatagatgaagtcctgggtttgagtaagatctctcacaggataaacttcaaatgcaatgaggcaatgaggaagaacgtagagagctgaaccttgaagctgctgatatgctcattacagatgaccgaaaagttgcctattcattcaatttggtcctgtttttttcttttcttttttccatgctgctgagctgttctgaattttcttttataaattcacatctagtctaatatgagttttgaaaatatttcttaacattctatagtattacttctcactctattattgtgtccttttctgagtaaactttcagtcccgtgtaatctcatttgtctattgtggtctatagtgttgagatctcattttaaagatgttgcctgtaccaatgtcctgaagcatttctcgtctcttagtatttttatagaatcaggtcttatgttcagatcttcaattctgcaggcacttattcagtttctttgcatcatttactgatgaaatacttgcttcctttttgtgattttggagaatctgtaaaacagcaattgactgtaagtaagttcatgtagctctgggctctccttttatttttatttcctatgttctgtgtatattttcttccataggtgccatgctattttgattactatcatttgtaaattattttaacagatcccctgatatctccacttctgtttcctttgattgaaatcattttgggtatttggggatatttaatggttctacatgtgactcaggattgattatcttttctccaaatctgtgaagacaggcatttgaacttatacagtgaggctctcactgagtctcagacccacaagatactaatgtctattcacattttaacagcatcagttattccagtctttgaacaaaggaaacctagctatttatttggatcttattcagtttccttggacatttctgtcacacacacacacacacacacacacacacacacacacacacacacacacaaagagagagagagagagaggagggggggaagagagcgatcacacagatatttagaaaaaacttttaactctaactaaccatcagaatattaaaatcaaaactgtattgctatatcacctcatatgaaataggatatcgattgccataaagtaaaaagtaacaaacactagtgaaaatgaagagaaaggagaactcatccactgttggccagaataagaatgagtagcccattgtgaaaacagtaaggaggttcctcaaaaaggttgaactatgccatagtccagcaatactactgttccccaaagggaagcggatgttagagaacatctgcattctgtgtttagttcagcactatttacaggagccaaaacatggaatcaacataaatgtccatgagtggctgagtgaacaaagagaatgtggtgtgtatacacagcaaaacactctacagccttacaaagaagttgtgtagcactttgccctaaatgaagtaagtcatgcagagagaaagacaaattgggcatgccctggctcacatgtggaatccaaacccattgatcttgtagtcgataatagagtagtgtggttgctaaaaatgggagagaaaagggaaccatgtatcaatcaaaaccaaatacaaagtaagagagaactgccttaggctttctggccaattcatatctttattccacacatagaaattaaaacttgaataataaacatggcatgaagatcctgggaactcacaatgcagtgggtagacaatgcagacagaaaatatttacacaccattttatataaataagctggcaaagattcagtcagctgtatgcctgaactttctagatctgatcatctttctgacaagtttcattcttacccgagaatttattatgcctaaatacaggacactgattaaaatatatgggccaattaaagcagcagtacttaccagatttaactggaagctacccacattgtcaaatatacaaataggaggttctctgtcattcctagaatatgaattacaccatttcaataaggattgtatcagttgtatgagaagctgattaaacaatgtgttaaagaccgggatctagagcagtcattgcacactgtaaagcactcttgtgggcatgtccttgattcatgtcacagataatggcagagcctctgtgacagggctgagactatatagaaggatgagcgcatcaagtataaacttctccaggcaagaaaagacttaagatcatttccaacaataggaagagctttggtatttataccaagacgagagtgttgttgggaactgctatagaattcatgaggaaagtacagatgggagaagctagctctagcaaagcctttaccagtgtgtgtattgctggaaagatggaacagacatggccaaagtaaacctgaaaataacataaagaatgagatatgtcacactttcatatgtgggaaatgacagctaaaagcagaagaaaactaaaaagattatagcagcactgttcagtttttcttttttcttttttcttttttttttacattgcattgatgtggattttggtttattgttacaaatgtatggtcaattatgttaaatatatgatatatatatgtatgtatttatatatatatatatatatatatataatcttgtttatttttctcagtttcttttttattagcaagaaaattattttacatgtcaatcccagctccctctccatcccctcctcccctgccccccaactaacgtgttcaggttttcttaatcatatcacaataattaagttatttatcttcaccatgctatatgcgtaggtaacagtatattttcagattctttgtttaacctttaaaatatttatttttgtatgtttgccaacatgtgtttaagtgtacaagatgcatgtcaggtacctgctgagccaataaagggaatctggtccttcttccattggagttttaggcaattttgagctaccatatggatgctgggaaccaaatcaggtcatccacaagagcaatagtgttgcttaactgctgcaccatcctttcagtccctgttgatgttttttaagccacactgattaaaggagaaattataacaaacctatgtgtttacttcttggttggctatatttgtaattgcagattcaagcagttatccccaaagtcgttccaaatggtccactccaccatctggacagattgtatttatatccagtgaaaggaaagaaagtgtaatacagaaaacagaagagacgaagcctgaattaaggctttggtctgttttacttgaatacaatttgaataattgaccacttgggattggctgaaactcagctactaaaaacaaggctaggatatacaccaagttacacttcactagtctaaagtaatttttaacccaaacttaatatatgcatgtatagcctgctttgcacaaacacacacattaccacatatgataacctaagatacttttcattttgttttagttcattttaaaagcactggtcatggccactagtgagcaaactctgtatttgaaagcaggagactacaatatcattacttctcaatcttcatttctgaaatgtccatgggttttctgggacttaatgcttagcatgtgtatgtgtaatatctggggtatgcaactttctttcactcttgagttgatggaagtggctcatggcattacttatactttgcaatggaaccccatattgcattgagagatcatacataaattgagggcggtctcgcatttacccatcaaaatcatgtcaatggtaattttgaaaatatacacaaacgtaaaattttgagtaaaggaggttccatataaatatatatttcttatagcacttatatgacttgttttcatttaagggaactcatggaaagataccagtaatagcttataagataaattgattgatatcttatattttaatttacatagtaagattgaaaagatatccctaaacaatactacccagtacttaaaaggcagagggtctctactttggtgcctgtctgaactagatagtaaaactctgtctcaaaaacagaactaaaaacaacaacaagccaaaatattaagctgaactgtatgatacttggaaaatatgtatactatttgtatagtttttcttactaattgtgactgatatattaaaattttaactctattctgataacctagcgaatcttgtaacaagtccaatagtatggtattgtatggaagtcaccacctttgcaaaactttccccgaattgaattttattgaaacattggcattatagtctttagaaagtggcttatgtcaactgaaataacactgtagaaaaagtgacatcttcatatgccaaaattaaagtaaaacttttaaaataagttttaaaaaaaggaaaaggaaagaaaataagcaaataaatgatggtaagatgactcagcaggtaaaggtgcttgctgctaagcaataaaacctgaacttggtgcctgagacccacatgatggcatgaaagaagagactccagcattttgtcttctgaccaccacagggttacatcaaggcacatgaatatagtggcaaaagcacatgcacgtacgtgcatacacacacacatgaacacacacacacacacacacacacacacacacacacacacacacatgaacacacacacacacacactaaataaatttaataggaatttttaagtaacaaaatgagaaaactttaaatagacacaaaaagcaaaactgtatgtccttaagatgttccactaactcacagttgtgaatcctgtctcctgtatagattgtatacctcctaaggtagacctagtctgtgtggccattgggctctttgttctgacatcttatgaggtagaaactggaataaatattttaaaagggaccatcattaactaaatatattttatgaaaatttcaataattatttgttttcttcatataaaaaaaatgaagaatacattatttagattctaactcaaaattcaaagtatttaaggagttgtacagttttgatagaggcccatatataacaattgaaccatcctgacaaatgtccatcatatgaatataaccatgagaagtcactaggggaaatgtccttgatgggaactttacaaataactcaccagcagtaccctgtagcagtactattcaaagcaaaggaaagctctagaccacttccagactgacagaaatgcaataactaatgtcatgtgactttttattcaagcaacataaacatattactgcatcaatgtcagtgtcctgatttttacttattatagggaattctgggtaaaacagtagaccaatggatgcctctgggaaatctaggggagcagagagtctggaaaaaagaaatacaatttaatttaaagagggaaattaagaggaagacttatagacccaagaatgaagtaaaaagatactgggatagagcagacacaaagaggcaccctacatagaagggagcccaatacagcatcagtcatgcaggttccttgtccagtacagactctagattcccaagtgtaagccagaggaaaaccagacagactgtcctcagaaaaagtcacagctctcaaaagcctcaattaaattgtgggttttgacaagacagtggtttctctgggagatacgttaaccacagaaccctcattgagtcaccttctgaccaagagggtggcaatcaagcatcatctagagagacattctgttgtcacaaaccaagctgccctagagcctggggtcaaagaacatactagtctgggtacctcagccttggatgagggaaggcccaggatggcatttgtgaagaacaggagagccttccagtgatgggccaagtgtgtgggctgtaggtatggaagtacacaaagagagacaaccctgctttccctgattataacagatcccaactgataattatgctgcagtttgataaagctaagcctgaagctaacaggcataccaaattcttgaatcaagtagtcatccatcatgtacttaagttgaaccatagaattctaaattccaaaggcatacttggtattcacaaatgtatccctccaatatggtgatttaggtcttgaaagtagttgttctgtcctccctcccccaatatactaatatacaacatcactgacttactgcctggggaatctaagtaggttgcatgtgccaagcctataagaatgtaaagctaaatgtggccatcaaaggcccctgttcccaaagaagggcaatggcctctgcaaagaaagctctcctggacataaataaacagatttagccacagctgaaaccagaggaaatacaggaggccaccatttaattggccctctcattaaagaatatgactagctctctacaatatcccagggcccagaaagaagcccctctaacatctagtcttttgaagactagttttcccatatgattccttccctttctctcttgtttatgatgtgtttaagcaagatttttactctgaatagttttaaatatttttattggttttggtaataatttttgcatttatattaatctaattttatttatttgattcttccattagaaggaatattgttttcttactttccctgttttcttcctttcttccatttttactctttctttctttctttctttctttctttctttctttctttctttcttatccctctgtttccctatttttatagtatcttggttttatcatattgaattttaaaatacttgtttttcttattgttgattccacttattaaatatatgcactttaaaaatccttttcaatatttgccagtgtttcctttcttctcatcatctagtcactgactattgtcttcttccaggtagctttcttctcctctcattttcttcttccttcccctttttttccacctttgtccccctagacatttctcatctggttactgttctaactctgcccaaaatcattttgacctacatgacagtcttcagtgattttgcaatgttcagatccatgctcatggcaaagatttagtggcttataattgactttaagtgagtttcttaactctttatgtttgatgctataggagctacaagaattttttcctccaactgagtggtactaagtaataagccttaaagaataacatgttcattaagaaagtatgtcccaaaactgcagaagggttatctgaaccagcagatgagtatagggtaaacacagaaaaacaagaaacatgaaaacatttaaaagaagaaacaaagttttctaaataaaaataatcaaaataattttccatatctaataattcaaaaaactatacaaattacacaaataaatgtaccatgcttgaattaccagtgggtcatccaagaaatcggaaaagtaaaagttcccacagtcaaatgaaattaaatcacagcttgccagaatctttggaaagaaattaatcattttaagaggaaagtttagagctatgagtattcatgttaaaaaatatagagataaatttctttaacctaatggtacacctaaagatcctaatgagtcaaaaaaatctaaaccctaaaatagacaataagaattattaaagataagaggagaagacaattaaatggggactaaaagaacaacatattgaaacaattcgatagtcacttcattgaaaataaataagatttgaaaatccctaaccaaaataaccaagttaaagaaaaatatactcaatttcatatggaaaaaacaaaacaaaacaaaactcaggagagttaaaacaatggtgtacaataaaagaacttccagaagtgtgatcatccctgatttcaatctctactacagagatatagtaataaaaacctcaaggtatttgcataaaaacagacaagtgaaccgatggaattgaatctaagccccaaacaaaaacatgcactgttatggatatctgaatttaggcaaggaaatcaaaattgtacaatgtttttgttgacttccattcactcttcattttaccaaatatctcaccatggaagcatggccacctaccagacaccaaggcactgaatttggctgtttcagaaacttagcatggtgatcctctttagcagtaagcaaatgcactcttgcttacttcaaagcttgcatgtgctagcaaaaatatcaatttgtcgaattttttaaaacagttttgttttaaaaaatgccattcccatgattaagaacatcaatctaaagaataaatgctattgttaaaaacagaactcagttcttcttttggaagaattagaacagcaaataaccccccagaaagcaatcttctgataatgggtgagacctttttagaatcgaatacctagatacattcttcaaatggcttccctccccctgaatagattcgctttatgctgaaatcaaatctagatctcttagcataaacacagcaattattccaatgggcaattaatcatgaaaactatctttagaaagcagaataacttttatttaatctaagaaaataacagttatttaaacattataatttttaaagttcaaaaaagaaaagaaggaaattctaggttacttacctctaaaatatttataaaccacatatgtaagattgaactataaaaacattttctctttgcaattaatgaaagaaaatatttggggaaatgatttgaccacatgttcactttctctaagtaatcccaaagcttccctgatgccaaacacacataaacaggacccatcctattgctgtctgcatccatgaaatacaccttaatttcaaggaaagacattacctcaggataaaaggattaaaaaaaaccgatattccaaacacatgaaccaaagaaataaactgctgtggccattttaatatctgaatgtgccaggttttgttgactcatcatgggagaccttacactttctgagaaatgcatgggaggttgtgttgggggaggtggagggagagggagaagtgggagggtactttggttgaaatgtaaaatgaataaaaaaatttaaaaatctatgttctgtcaaattttaaaatctaaaagaagtagataatgttctaaatagataccacttaccaatgttaaatcaataccaggaaagcaatttaaacagacctataactcctactaaaatagaagcagtaataaaaaacataccactaaaagaacttcagtactagaaggtttcagcacagaattctgactttcaaaaacgagttcatgccaatactttctcgatttttccacaaaattgaaacagaaggaactttgtctaattcatttccaggatgcacatttgagagtggtcagcagaaaaaattcccagtaggtgatgagatgcacatatggaccatgaagagggagatctgagggagacaccagagtatccactccaaaatcaagaatgaaagaatgggaacaagcacaatcaagtttatagaagcaaataagttttaaaagttaaatgggcatatttgagtatacaatgtagattgaaaaggacatgctagttgaaaagaacagaaaatattaaaaataccacactttttgttgtttctgtttaacaatttgtttgttttttgacacagagtttctctgtgtagccttggctgtcctggaactcactctgttgaccatactaaacttgaactcatagatatccacctgcctcagcctcctgagtgttgagattaaaggcatgcatcgccatgggccagttaagatattatacttttaaaccaaaaatttggggacaaaattctacattacacattgactaacaagaagatggaatcaaagcagacataataggacatctaaaatttggtgttgtctactgtctcgggaaagtcaggtaagagttgccaatgatactgaatggctgatgtgcaaagttaacactgctgtgtcattgggtgtttacactggaagataactaaataatcagagtggactatggagacaggatctacagacataatgcatgatgtgagcattatctattgacactataaacacatccatcattcttaccccttgggccttctttttgcagtagtggtatggcaagctaagactctcatctgagacaaagtgatggttaagcaggagcatatgagtgattctaagaatcacttcttgaaatatagaacagtacatatgtatctttcatttttttctgttttaaatacagaggcaatgattgaagatactgtagccatatggaaatgaaaaggagttataaagagtagtagaaacttaccccaaatgtcacaggacttcaatgaaaacagtcacataccatcatgcattttgccaacataaaacataaactccaaatagtaagtcatttaaactgcatttctgctatcattcataattcccaaataacatcataatgaaaacagaaaactagtgacataatctaggaaatatttcatgggaatcttaccaaatgaggaaatggcaactgggaacagaaagaccaaacatgtaaaatatgtcatggttcaatctccagggggcagagaaatgtaagagagatagattgaagactgagggaccattctgaggttccacttcacaaagagtccttttattgaccaatcccgtactactcatctcatttattaatcctgaagttattttaaccctcttaaccctttcaagtgctttgtttttcattcgtattcttgtttagtaacctcactatcaatatatttcaaatataattttttgtaaagcctcctttcaactaagccctcaaagcagaatgttctccaaaaacaaagataccattttctggataactttgtagcatttggtgtttcacctatattgtcagtttcactattttaactggctggagtatgtactgtgagatgctctctcttatctcaagcccccttctctggtcattgttccattatgggctacacctttggtatatgagttgaaagatgaaatcatgtacccatcttccttctcctgcacttgcagagaccataggaagataatttccaaaacctacaattcatgggactttgtagagtgactctgaaattcaaagcaaacagacatcttggctctgctcttcctgccacccttcctgggtcctgctctgaacttctcaactttgcctgtttatcaccagctaattaaacctgatttcatctttcagcttccttcttgactctgtggttagttaaacctctcctctccctcctaattcttttctccagataacatacctctcactggctccacttatggggacctttccaagcttccttctggttgtagaatccactctggccctctttcttgttccccaatttcccacccagaaccagaagcctcccactcagttccttccacccctcagcttgtcttccaggcctggatgttctttcctggccattccccaaaagctcagttctgggctctgtcactcttctgagaaagacagttccagtttcttaggacatactcagctttgccaaaattctctgtctttagatgcttcttccagtttccctgctgagagagatgacatttctgagcccaagtttttcagagtggggatgaacaggaccactaaagctgatgatcagactttgaagttgcttttcctttaagaaaaattcttccagcagcagtgtcctgtcacattgagaaggtgttaaaaatgcgttcaccccaagaggatcagagttagttaatctttgtggatattggaattatttaacagttcatgagacagatctgatgtgtgtgtctagggttttaaaccaaagcagatactgtacctggcttgttctccacatggctcctttctgaaagacttaagatttgtgtcaccttccatcccttgtcctcaaccatagttcagcccacactgacagagacagagcatgccttcataggtctccaggacagttgcagaggaggctggcaatataacaaggcctggatgagggccagagaaaggttgatgaagggaactagaaaggctccaactaacaggagcaatgctggctgactggtcctgaagaaatctaaggagtgatggtgggaagtactctgaatatcatactctggtttctgtcttgtttttccttttacctgcatttgcaaaagtatggatctgggcttggaaatcttccactcaatgaggaaactgggaaaagagatattgttacttttttaaaaaaaatgtgtcttaataaaggcagaaagtgtggtgggaaacagtcaactttctaatgagatagtgtgcattttgtgaaccaatgcatgcacacagatatgcacacacatgcatgtgcactcatgtatgcatgtatatgcagacacatgaatgcatataccaacaaacatgtacatgcatacagactcacacaaacacatatgcatacacatacatgtaaacatacacacacacacacacacacacacacacacacacgtacacacacacacacacacacacacacacagacacacacacacacacacatcaaccattccatactctgctttggaaatgctcttgagtagcattactgtacaacctataataagcaagatatcttcagtctcattataaagccagaggtatcctcttacttacaggtaagtgtacctctcatccctcatcaaagaagcttcttttcaaggagacaaaaacaattaaaaaatccttaactggtcaaaatacaagaacaagagaccatgaggaacacagccacagggccacagttgatacatcagcaataaaaaccctacatccaagtctcagggaacaacctcagaaaagaaagctgaaagactgtatgagacagaaaacaaagtcatctgcagtgatatagtatcttgtatatattacagggaagctgtgcccatgaagactcaaaaatatggttaccttggcacatgtagcagtgaccatgccttttgggagtggctacaggtgctgatgtgaccagataaaggaaagcacctgaggtctttagaagatcaaggaggcagggctgcatcattggagcaggaatgtagcaacagtcacttgccattttctatgtaagttcttctaccgataaaacaccattaagtattctaacaggtctggttaattcattactacctgcctattgtgtttgtgtgtgtgtgtgtgtgtgtgtgtgtgtgtgtgtgtgtgtgtgtgtgtgtgtgtgtgtgtgcttgtgtgtgtgtataataaaaaagaagaggtgatgaattttatagtgaatgagtatgagtaaagggcatgggagaatctaaagtgaagaggaaggagtggaaacaataatattatatattattatgcattaagttctcaacaaaagttaaatgtaaatttaaacaataggatacttcaaagattttacggtacttataaaaatattatagtttggattttttaaattgaatgtcattaactataaatcacaattaagcatttttccaatccctgaaatcttgaactactaagtatagttttcaccaagatttctgtattttaatgaaaaaataggaaagagatagctatacataattgtaacaagattaaaagaaatatgagaagctgactaaaagtgatgtcacctctctagggtgacttactattaacagaagtgtgagttttgcaagtcggaacttgctgagtactgaatttgggacaaggtagagagagtccagtcaatggtaatgattgcttttggtgcagagcatgaagtgtggccaaatcttcactctttcagagcagagagaagacaagttctgaaaactggagatgtattgattactcagtttttctagcttcaatgcacacttgggttctgtttattctcctgataaataagacagatagataaataagtgttttcttaaatatttagaaattgggaattatttgcatcaagataatagtttctcttctctattctctctgaggagaatataagcacacagaattttggcttcctgtcactcatatctgatgtaggagatgaattcattgatccttgaagtgatttagttgatgaatctttcttacactgtggccaaataaaatacacggaattatttcacctttctgtatttgtttagatctgtgtcctaggttatggtttaacttagaaaaatttccacaggttgctgcataaaatgtatgttctttttcattggatggcatattctatagatatatattaggtccagttcatgtatgatgtcatttaattctaatgctttctggtttgttgttttgttaagatgatctgtttataggagaaagtggattttgagttagcctactaagtttgggttaatctgaatcttgaattcagtaatatactttatataaaatttggtgcaccagagtttggcacatatttttctaggttaattgttcctttggtaagaatgaggtgcctacataagcaaaatctgtagagtaaaagataaaattaaactaataaataaaagtaaaaaatacagtactaatatgatttttgagataaggaatctgcaaagaagctgttgagttggttttctgttggccatctactgctgggcatgcagcctatctttaagagtcctttgttttccagtgagactccattggagaaaactaaatttacatttgaaaatggttatcaattggagattgcttccgggttaagaatggaaacatgtgtcctctctggtacaggccctggccctggctatgttgcttcagtctctgtgggttcatccttgtgtggattctgttgatttagacatccttgtttctctgttgtcctccatcccctctggctcttatatttttctgaatcttcttcagtaggattccctgatccctgaagggagagatttgatggagacatcccatttagggctgagtattccaaggtctcacactctgcaggtctcactgtgggtctcttcatcagtaccagtctggtgcaggggaagcttctctgctggtggatgaacaaagcattgatctcctgttcagtgagttgtgtagatgttattttcagcaatggggcctttttgctagtttgtgaaaatcaacctatagcctttgtgacacactggattatttggaggtttccatgggcccacttttgatggggaattgcttttgtgtatgtgtttgtcttattggactatatgaccaatgaggcagcaagttatgtgggactaggagtaggagtcaaggatgattctgggaaggttaggagaaagcttagagtcaccatgtgatctgcaggcaagagaggatgctagcagaaggtgtcctcaataaatcttataaaatatatagatttatgataattaagactgggctagcagatgagaaatcctagtcattggacaagcagcatttatacctaatataagtctctgtgtgttacttcggaccattacgtggcagcgggtggaacttgggtgcctggtggaaagcgcccatgtggcaggcaggactctgcaggcttagcaaaaagacttattgttacaccctttgaccatcaactcatatgtaacccattccaagtactgaagtttcaattgatcatgagagacgtccagttggggtttggtctccccaattatttggcaatttcatttagataaccttcatatatgcatataatttaggaagcgtctactgtattaggttttcatatggcccttaattttagttgtatctttttcaggaaccccaattcattcctttcctcccctccttgtttggagaatccacttttgtaatctcattttctattgagaatccagttttgtagaaaattggtattttaatataactataatattttctttgctaaaatttatttttgaacatattgatgttattcctttttattaattttcttatctactaaatatacatgcatattagattactaggccagtcctatgacaaaacataagtgtttgggtgacttaaaaagcaaaacttctcccatagttctggagggtgaatatttaagattaagactttggggtggtttcttctgggcccattctcttgatttgcttgtgactttggagttgcttgtagagatatagtacacagcactgtgcatttctttaattaaatttgccagtgagcccatgttcaaaaataatcttaaaatggacagagataaacttggatttcaggttgtaactctaaggcagtgttcgttgccttaaaaggaacttagaatccagagcttagctggaagaacatctggaaggtgtggccttacagataggcccagccctggcaggacttggcagtagaagcagaggcataaagcaattcagaaacatttgagaaagaagtctgaacttggtctgaaagtccaagcataagtgaacattttccttgaaagggaaaaaattgtattgattgtgcttttctggaaagccttggaaattgtttatatttcacacacgtttaaagaagacagtgtcaaatcttctataggctcagcatcaatgggtgtgtaaaccactccaaggcatcttgacatctgcttacctggtatcttctcatagtattggcatttgaatccactgttttattaactaggcaaggccatttctaaatttttagcagatattctaaaatctgatttgtacattcatggtgcttctaaggaataattaagtcgtatacttttgtaccttttctacaattcatgtttatattttacatttatttaacaatgtatataagcacatttgagaataaaaccaggaaaataaagcaagcatgaagataaaatgaaaatagattttctttgccaattagtgtataaatgaatacatctaaattatatgcataatgcttctttcttaagtaaaaaatcattttataaaatatagtctgaagcatcatgacattgtatcaaaaccacatattaccataagtatgttaagtagtagaatgtagaattcactataattttagagtggttaataatctaggtagatgtgcctacctgaccatccaaactgagtgagatccttaataagtcatgatatttaagacatgaagacagatacagactttaaatattcctgtacattaatatatcttgctgcatctgtctccaagcccttcttgcagctgtctccagcagtttttgttaacatcaggaaaataaagactaatgagaaaaattattcattccatagtgtaagtgggcataaaatcagctgacctgaacaagagggagctcatggaccccaaactgacagctcggaaaccaggataggacacaaccaggcagtctatggggcccctggtagtggatcagtatttatccctagtgtatgaatggacattgggagcccattccccatagagggatactctgtcagcctagacacataggggagggcctaggccttgtcaccaataatttgacagactttgatgatttccccatgaagacctcaccctttctagggagcagaagaatgggatgggagttggtggggggtataggaggatgggagggagagggaaccagaattgatatataaaataagatgatttctaatttaagtttaaaaaaatcttcctggataaagaattttcaaaacagtatgttttcaccctaatttaaaaagtttacagccttttcccatattgtgattctctaattttcaagtaaagcatatagttaaatatgatatcaacccagatcatatttaaaaagatcagaaacatttttaaacagaaggtagaatttagtactcacactgtaaaatctagagtgtttgtaggaaagccagctatgtggttatgcaactgcttcttagattcacatgagagttctccacaaaatctaagattcaaactttaaagaagcaaacaaatactgtgctatagacaacctgaaatgcaaatagcaaaaggagtgttttgtaacgcaacagtctgtgaaaacaaatgccacaggcagcgcctttctacaagcataagatgcagaatacagacaactgaggggcacacgggtgtctaaagctgaggatgacaaatgaaaaaaatcatagaagttcttttctcttccaagttgttttcagactagtgattaacttgaacccccaagaagaaggatcccaaatgtcaaggtatcaagtaggagggatggggatgaggaatcaagaagatgagaaataaagatgataaagaaatatctgggaccagaaggtcttgcctgagcttatgagttataccaagcaagtttattaagaagcacaggatcatttatactattggtggggggagggagatcagtcaaggtcagcagagagctaagtcagataatgttggcaaagagaacacacgatacctcagacacagctgcttcggtactaatcaccacagcccagctggatgaaatcagattcccagaaactaaccttgacttatctcaggcactgactctggcctcagacagtacttgcccagtttgacgaggacacagaactaaagtttcattcatcctttcattagggcctctgagaagtcttgggtctctctgactgcctacagactgtctatccttaatgtgactataaacatgattatctgggctcacctaaagcttacccataaagacttttgttgttgtggttatctctgctcagtacagaatgtattttacattcaggtgtgatggacaaattacagaatgtttcttttaaatgactcatcataaaaagagcgcggagaccctagtcttaaagttggagaaacagcattggactgaacaaagccctctgaatgagggggccagcaaggaggtgagggtagtctatgtaacctctaacagtggagtcagtgtttatccctagagcacaaatggactttgagagcccattccttatggagggatactattgcagcccagatatggaaggtgggcctgggccctcccccaaataatgtgatggattttgatggtctcccatggatggcctcactttctctggtgaggggtggggtgtgggtagggggagttggtggggatgatgggaggatgagaaggcaagggaatggggggattgatatgtaaataagagttcttctaaaataaattttaaaaatgtaaaaaaacaatctcagagttcagatgtataaaatgtcattactaaatatagtgtttcctctgtcatcctttacagtgctatttatttctatgagccactgagcaggctttgactagtctgttccattcctactcatatcctctatttctgcctaatatgagactcgttcattatccaaacaccagtctcttttcctactctttaagcttcatcactacagagaccaagcctgaagttttctatcatatatccagtattggttcagtcacatagtagatgtctaatggtctcaattaaaatcattcagcagtagatttaaccgattaattaataaatatgcatatagaaaagtccttaatactgctagagaggactgttagtaaataatgaaattaatgagtaaatgagtgaatgtgtgagaaaaggagaaaaaagtttaggtaaaaggcagctcttaggattctggttcactggaagcatcctagatacccctcaactgaagaatgggtagagaaaatgtggtacatttacaaaatggagtactactcagcagaaaaaaaaaaaaaacaatggaatcttgaaatttgcaggagagtggatggaactagaagaaaccattctgagtgaggtaacccagtcacaaaaagacaaatatggtatgtactcactcatatgtgtgttttaggcatagagtaaagattaccagcctacaatccacacttccagaaaagctagtatacaaggagcatcctaagagacaaatacatggtccacttgagaaggggaaagggacaagttctcctgagcaaattgagagcatcgggggggggggtaggcagaaggcagctaggagaatgagaaggggagaagagtagggatgaggaggacaggagggagccagaaggttgtgtcaggggaaaaatagaagaaaacaagaaaggagataccataaagagggagacatttaagtataaagagaaatccggcactagggaaatgtctggagatctaaaaagatgacaccaactaaaactaacaacctaagcaacagaggataggctaccttaaatgccctccccttgtgatgagattgatgactgacttatatgccatcctatggccttcatccagcagctggtggaattagaagcagatagccacaactaaacactgaactgagctggaattcagttgcagagaaggatgagtgatgagcaaaggggtccagatcaggcttgaaacccacagaaacagctgacctgaacaacatggagctcttcatccccagactgatagctgggaaaccagcatgggactgatccagaccccaggaacatggatgtcagtgaggcgacctcagaggtttatggggcttcctgtaatggatcagtacttatctctagcataggtgtagaatttgggagcccattccacataaagggatactccctgagccaagacacacaggggtgggcctaggccatatcccaaaagatatgaaagactctgatgacccctatggaaggcttcaccttccctggggagcagaaaggatatgtgataggtagagttttagttggaggatggggattgtagggaggagtggagggagagggaactgggattgacatgtaaaacaatattgtttctaattcaaataaaaaaatctgcttatttaaaaaaaaaaacacttctggttcaaagtccccctcttcctacgtaaatcattagacatttttaaaattcattttataataccggatgcttgttttatggcatatattttatgaaatgggctttttacctgtatgcttgggaacataattagaattccctgggtatttaggggattttggtaagagaatgtccttagtgaattttttaaaacatcacaaattttctcctctgacctctgagtcctgccaacaaagaagattgagctgtagaatatgacatgggctccatcagaaacctctgtttcccagctcctacacccacctgttcccattaaaagtgcctactctggcttacaaacatcttgtgactcacaaatcaaaaagccaacccactttctctcagccttgaagagacttatctctgaccttggttccactcctaactcccaaacattcctgcctatgattgcatgaaggatccactgaaggtcagtcctgtaatttcaacagatactcatagaattagtatccaaagcctaggctatctagccttgcttatcagcatgttgttacattgaaactaaacaaccaaacaccataatgcattccactttgcttgtctattgctatttgttctcaccaacaaagatgaagtccttaacaatattgcacatccagtatatagtagacagttctaaattctttatttctataaatactggaaataggtgcatgtgttagattaactttgtgctctaaatgtatgtaaaaatttgatctatgacaaaggctaaactgtcaacatttcagagcagatctcagaattgtgagtgaagaccagggttgttaaagttttgcatttttaaattttaaagtaaaatgtggtgactaagaataaaataagaccaaactccggaaatgtaaagacatagaagttctagtttagtcacttctagtcaaggagaattactcctgtgtaacactttatttagtaatcctaggaaatgttcatgtacttaccctagccaggcactttagacagcagaaacagagcagttcatttgaatgtgattgctaattgttctatagaatagagacaaatgatgagaaaagtatttgcatatatgtgtgtcaataaaaatacatagcatgtgtgtttgtattacatagatattcaattgtatatacttagttattatctcataaatgctcatgaaagctcaagatttattctacctttctcatacatgcaaatgagatgtatacttgaaaattgacaaggtgaaatttctttgttggccagtgacactaagatagctctaacaatttgcatcctttttcaattagttactcttctaggattttcatttttccacccctatgctttttcctagcattccacatcagtggatatcgttaaacatcttcacattccttgatattatgtctgatttggggggtgggagatttgggcactgcaaattgaaggcagagttttgtgcttcctagacactcactctaccttcttcctcctcctcttcttcttcttcttcttcttcttcttcttcttcttcttcttcttcttcttcttcttcttcttcttcttcttcttcttcttcttcttcatctttctgtcagtctcaaccccaactaattgctaggcattgtggtgggctttgccatctcagagttgatgccagtaggataggtctaaatccaatagattaagaagaggttgcagcatcattaaaaatgtagaagcaagcctggaggtggtggcacactatgcctttaatcccagcacttgggaagcagagtcaggcagatctctgtgagttcgagaccagcctggtctacaagagctaggtccaggacatcctccaaagccaaatagaaaccatgactcaaaaaacaaaacaaaaaaacaaaacaaaacaaaacaaaaagcagaacccagccacctaccgtcttagtggtgcctagctaagtatctataatatgaagtcattcagcatgcactcagtagctaaagtatacactggaagtcatcttcagagacactttctggatcatagagttgaagttccaaaaggctttttaaagttaaaattgtcaagggctgtgatatgatgtacagaatgatacattctgagttacttttcttactttatacatttcagtaaactttagaaatggcccaagctcatggcaactgttctctggaacaggaacacagccatctcctgcttagagggacaaaccaaagctgttgatttccctgctattaggcaagatgaacaccaagtcaatagtacaaaacaaaaagaattgtatttgtcttacagttggacattttagaaataattttctcctttcaaagaaacttaatttgctcatttctccctagtgcttcctcctccaccttgtaaacacattttttagtgaaagtattttattaaaatacaatatgcatgcagaaaatttcatgaaacacaaagttaaagtggatgtgtttttacaatccttgtaccactggtaccccctaaggcaaccgtcacttccagggtctgccttctatgcctcaagttgcaccatggttctagtctccatgccttatattctttgactcctctgagaaccaagcaataaacatcctgttatttctggattccttatgtaccatattgcatttactaggtgatcctttttttttcattattttccacattgaatgtagatgaattttattcacttccaattctgcagagttctgctaggtaggcatcccacaagcagttaactttgctggtaaaatcactttgggtggaaaattccagtgggtgtctgctttgaaaaatgccacatgaaaagttttgcacatgttatttgatcactacataaatgcatttctgttctccagttgatctacatatcaacatttgacattttatatttgtttctgttgctgcctatttgataccaaatgcaagtttgttaaatatgaacatgatcagaaacattctcaacctgttaccttaggtgaacttgaccttggcagtgttagctaatttattctttcataatgaaatgtatctgggacagagtgagatcacccaagaaggcttcaatagtggataattgcccttgctcccctgcttcctcaggaacagatgatcttagctctcagttgccatggtctcaggacaacaggttggccaaggcaatttctttttccaatttccttggtggagatgctaccagaatttctccatcagttagaacaaattccactctagaaatgtatttggttaccatgggtttttgttgttgtagttgttaataatttatagctattgaataaggattgttcatttatggaggggttattcatgtgtgtcatggctctcgtgtcttttggtattgcctttgctcatggcagttgtgagagcagaaaagcaggatgtttactctattgatacacatttctagaattcttccttggtcaaaagtgcaactctattgaaggaattttttgtttggggagagaaaaaagaaatccaaacaggaacatgttgagatctcatcaactactttcagagcttttgtatttcctttgctctgttttactttgtgatatttcttatttcagttttgagattatactataaatacatcattcaactctttactttcttccatccaaaacctcccatattccccttctttctctttttcaaatctttggcatcttttatttattaattgtttttatatgatatatatatatatcatatatatcattttatatgatatatgatatatatatatatatatgtgtgtgtgtgtgtgtgtgtgtgtgttccaaaagtagtaatccattcagagttatattacttgtttacatacgatctctcagctgattacttggtatttgataacaaattggtatgttcttccctggggaagactatttctccagttcttagcctttactccttatcttttccatgaaatatctttttccacttattacttgttttgaaagaactggagtaatttttcatattcttctgcaagtatagttgcatacaatcctttttgggtatagatgttattgttgcattttactaacatatattaatattatacaataaaatgacatttccatgcaagtcataatatatttggatatatttaccccacattacccttttttggctctttccttttccactgatcatcttactcttctcaactcctcttccttctattgtgtgtttatgagagtgtctgtttgtgtgcaaatgtatgagtgtgtgtgtgtgagagagagagagagacagacagagagagacagacagacagagactcagagagagagacagacagagagagagagagacagacacacagagagagacagacatagagagagacagacacacacacacagagagagagaaagagagagagagagagagagagagagaacactcaggatcggatatctggagtcctgggtgctcatctgtgcctgcctcagaattgtcagcaattgtatcattaaatctttaaagtcaataagcctttatctacttaaactatattaagaatgagagtgagagattgtggggggggggaggcagtagagacccaatgggttcctttatgttgtttacggtagcataagtacctttccagagggtgctgaccccactgaagaaaacaaaacacccacccccgctaatagatgttataaattttaattgtgtgattcctctagtcttttgcttgaaaaggtttgtgaattttcttaccgtcacatatacagtgttagcaccatcatatatacataattctatgaattctcaaagcagattttatgcttaatgatctagttgtaaatcagaataatgactaattctaaatgcaatggaacatttcctacaaatattttatagctttgagtttctccttttttgtttatgagacttttggcatgcaaaaatgtctgtaattttataaagaacaaatgactttaactcagtgttcctttacaacttctaagatgttgtctttttgtcatgacaggaagcaacttctctcctccaaatttatacaaattatctcctagactttcttctaatgtatttactgtttttttgtgtattcaggtgtttggtgtattcctgtgtgtgctcatgtacacctgcagttcaaatatcttcctccataactcttgaccttattgtttgacttgttttgctcactgagtgtgaatctgactaatctggctaggctcactggccaaccaactccatggactttcctatctttgctgcttcagcaatgggtgaacaggccaatgatgctgaaccaggcctttggatgtggaaactaggaactgaatagaggttttcatgcttgtgccaactgagccatgtccctagcctctcaatatttttcttcaaagaaaaagtaaggaactcatgcttggtagagcatccctaatgccagtgaattagaatgcaggctggaagaccatgagtatgatggcagcccaggcaacagggtaagcaatctaggaagaaaaagctgagaatcaattgttttcttttcattaggaaaaataaaccctgtgtctttctagataagtaatttaaccctatatacaaaatttattaaattatctaatttttcttgttgagctatatttacaaccacatacatattgtctctttgtatgggtgctcaaccttatgtaacaaacatatttgtatattcctgttccaatgtcatgtactattgattgtaacaagtttatatttaggtgtttgaagacccttgctttccctctttcccaatattcaatattcataaatttattgagaattattccccatattttattagggttttcagagaaaaagaaattaatgagttcacgtaaaagtcccaaagatttattagtttgagttgtatactgaaagtttgaaggtcagaaggcttcttgatgaatccctggtttaattcccttctcaaggtctaagaaacatgaattattgtattttggagtaataaaaacaccaaccaattaaaatatagactataagaagaactggatcaggccctgaggatcaaggctatcaggctatgacttggccataagtctaaggctaacttgaattacatagaattttccagtatatcctggcctacataggaagactctgtgatatttaatattggttgttgaattgactggatctagggccaattaagatagatgtctttggtaggatctataagggaatttccttgaaggattaaccaagaaagcctcccagggttgccagcatgtcttgtggaatcccaactctacagaggtctggatgaaagcatataaccactttggcctaccttcttcttcctcttcccccttctcttcttctgtttctgccgctgtcatacttcactaccatcagaaccttgtttgtactgtcttccaatatgacctggactgggaactctccaggaatcccccaagccttaagagtcacattaggacttctcagacaccaagcctcatagactgagcagctactgtttttttgtcccctatagtatgcagtcagccattgtagaattatcctgctcatagcctgtaaaccaatttaacaatcattgttaatgtgtattgtttctatcagttttctttatctaaacaactcagactagttcactctgacttaatcttttgaaaaattcaagtctctcttgccttttgctccatattcaaggtggatcttccccattagttcactgatatacaagccagtcatttctgccagctttttagactgtctcccaaagaccaccagtcactaaagagtaatcctagtaaatgcatattccagaatatttttagttccacataaaagttcattagagttatcatttgatttagacaagttttgtattaatatttgaaatactcatacttctatgatacttcatgtcattaacagtatttttgtaatttatttggatcacatacttcaattttgacatatcttttactatatttaggttgaatattgtgatactttctgactattgcaaatatattatttttccagtttcctttcaaccttgctacagctaggtcagacacatagtaattgaagctccaactggatcctgtcctagagattcgagggtaatattgggaggaggtgttcttttttttcgtggaacagagattatagccaattccttgtcaccggcttaccagtagggaaagtggggttgaggaagaggaacagaaatagtgaggtcttgaagttattgttttcaaagcagatttaatacattatcaactgtccttaataactgaagacaatacatttatcttcatctgaattaaataagcttaaatatgttttagttgactttatttttcaaaataaatgtttgatttggccttcccaagtgattctcatgctaaccatcttcatataaacatgattctgttatttactatcatcatcaacacatgaaaaataacaatgagatagagttgagcatagcatagttgttgaaatgttatctaatgtgtatttcttcattaaagagttgaactctaagagatataataaaaaggactgatggctccaaatgagaaactgtaaaatatagaagcagttgtgtgagaacataatgaatgatgaaaatttgacatattaatagtccttccagaacttagaaagtcactggctatgcatttattcaagaaaatttataattaaaacccaactaattatatcatgagtagcataatcatactctgactcaaataaactgtacctgaatccgttacaatgttctaaaatctgcatctttcctcatacctgggatcctgagatgttaactctgattttgtcttctaaatttaaagttacattgacacccaccacttccttccaaatagttgattatatttagattatatttaggaaatccctttgtgtcatactgaaaattgtgagattcaaatggtatcaatatgcacatttgtctttaagacaaatttctgcattatttgtcaattatttgcttggtattttatttccatccatgcatgcttgattgcatgagattatgatgcaaggagttttatagacatagatgataaataacctgaaaaatagacaagatattcttgctgtcactaaacgtagattctaagaaggaatgatattagataaatctgcagggtgttagtatcataaaataatatgaagttgtgtggggacaatgagcagtactagaaagcagtgaggttattcttttaactgcttggatatttgcaaggagagtgtttatatgtaaggaaatacatgccagagtctgcatagcatactcaaggggtgtcaagacagtctgaaagtctaggaggtagaagatatatagtgagaggtcagatcttgaagaaaatggtatttgcttggaaattttacccatttgctttcccagatatactacaaaatgtctatggaaagagctcttgtacactgcaaacagaattacttgcaaataatatttagctttatttggttttgtggatgatgtgctaagatgtagagaatgagcatagagtaacaaaaggaggacatcaggatggctacgacgatatgacttgagcaacagaactgcatgaaaaacagaaggtagttgggtataaagagaaaggacaggagggaagacagagagaagagatagagacaaacacagagggaacaaaatttgagatggcaaattgtaaagtagatgtaaggaaaattatataaatcagaagtaccaggaggaagttagaattggagatgtaatatgaactgaggaagttgatatagatagtttgggttcaaatgcacatggccacaatgtccacaggaggcactcccatagaaataaagagcagcaggtaagacaacagttttcgctccccaaggaaggagggtattacttttgctaaaagttattgataattgaaaccataatttctgaaaaatggtattgagtgtctcatggtacagataattaataacacaggtaaaaataatattacagaaaattacatttcagtgaaaatgaaacattgtctaaggatgctctgagttatgagattctgaccttcattttgtagagtaattctgtaacttcataaatgatatctggatgaacttctgtgctttctagttacccttgaatcaaggttgggaaatctatttaatagcattgcctcatgccagtttttctttgtcccatgtaagtttcttctgattgacttttactttcaaccaggcttaatattcttctgattctctcatattatcagaatgcattctttaacatgctcatttctatatctctaggatggccatgatttttctttccttttttgtgtgtaaattgtatttcaccattatttttggtagagttgtgtgaacaaaaaagactgactcagataacttttacagaaatggggttcaacaaactgacagttttcaggaaattcatgttttttattattaatgtatacaatcacaacacaatttagcaaatattttcaagtactgtgataaagtatacccctagcctgagaagagaaaactgtcccaaaggccacatgaagagtagatgtacaggtgttagaagcaaaccacagtgtcagaactgaaggggaacacagttgcataatggcagcagtcatcaagagacaatgtctcctgtgaaaaacgtacattttccatattactttcctgtcctacatctggtttaggtaaggcaaaattaaagttgaagggtcatcctctgagaagtcctacccaaagaaggacaaaccccttgtatgagacattaaacttgtatttggatatcattattaggcaacatttcagaaactattttaaaaataaattcatttttttctgaattctaattttacatagtctttccaaatctatttaggtggtcttttacccagactcagactatgaaatatatcatattgtccataggctaggcaatgtggttattgcctattgctgcatgtagacaataggtacaggagcagaaggtcaagaacagcctcagctacttaaaatgtttgaggccagcctgggctgcataaactctttcctcaataaaccaattcaaaccaaatctgaaacagcagcattcttaaaggaaccaatcttgacatacaagtcagtccctacacacatcatgtagccttcccatccccctgactaggtgattcccctggcctccacgtgatggagcaagcaataagcaaagacccatcgggaacctgtagaacccctcaaacctgcatgtctggacgtgttttaccatccaccttcttctttttttttttttttttttttttttggttttttgagacagggtttctctgtggctttggaggctgtcctggaactagctctagtagatcaggctggtcttgaactcacagacatctgcctgcctctgcctcctgagtgctgggattataggcgtgtgccaccactgcccggcaccatccaccttctctttacctcactgtcctgtctctgttatatttccctctagaggtgtcagaaagacaggccatatgcagcatgatttgtctttctggtctaacagaacagcagttctcaacctgtgggtcttgacccacaaagaccataggaaaacacagatatttacattatgattcagaatggtaacacaattacagttatgaagaagcaaaaaaaaaacattttaagtttgggtcatcactacatgaggaactctattaaagggtcatagcattaggaaggctgagaaccactgtatcagagaaacttctataggttagaaagtaggaggtgttggctccccccctccacatgcatatgagtagaaaaaactcatcaagaacatatttcagcgcctatatctaccccccaccccaaacaaccaccctcagtgctgactgctgattaattggtttaggcagctcaattttgttctgctttccgcctgtggagataacagactccaaaccagcctgccagcatgttggaatatggattctaccaccacctgctggccaatgacttatactgccctcaaataataaattcaagggaaaatccagtttcttcgttttccaactttccttctgttatcttctacaagctttcgctccttgctaattctccactcattttgttcatttcacgtttcatttaaaactatgttggctgtccacacaattcatatattatacacaactctgtaaaacatccgcattggcaggaaccttgactgtctgaatccatgctgagttgtagtgagaccctgccctaaggtacacattaatggtggctggagaaatgtcagagtcagtaacatgctttccaagcaaacttacagaccagagtttaatccccagcacccaggaaaaactgggtgcagctgtacacacctggaaccctagcaccaaagaggtagctattgattctgaagtagtaggttttgattgagttgactgtttttaagaaactgtttggattttaattgtgatatagaagttattttaacaaacatttggttttgtacagacattatttccactctggtggataagctcaataaaggtcacatccacacccaccaaaagaaaagaaaataaactacaaaattgttcttttaaaatgattaacttactgtatattcaacatttatgtattgaaacatataacatgttttgaacaaacaccctcattttctcccactccctctctctttgttgttttattttactttatatatatgatcattttgcctatgtgtgtctttgcacaccgcttgtgtgctacagacagtggtgagatgccatgtgggagttaggaattaaaccctggtcctctggaaaagcagtcagggctctaatcctctgaaccatctctcctggaccctgttgttgttttttaatccccttaagtcactcactgctgtttgcatgaagtcagaagagctcctggaacatgagtagcctttcaggaactatccccctaaaggaagatgatgctccctccttccccaaaagctcctcagataaggatggggatttgtgaacctctcccccatatgtgctgggatttgggctgtactgatattatctaagtcttctgcattgtggcagcagttccatctgctatgatttcacaatgcacctgtgatgttgtgtccagcaattatttcattacagatatccacccactcttgctccctgatccttgacagtctttctgctccctgatcctttagctttggtgggaggggagagggtatgatatggatgttccatctggagctgagaactctatagtcttttattctctgcacattgtctagttgtgggtctctgttttcagttgtcacttttactgtgaaaaagaaacttctctgaatggtgagagatgcaataatgtgtggcttagggaggagtttatcactatgttcagttggtagaatgctagtatcaggttctccactagagcctatgagctagctagccatggttttgggggccagttaacagtgccagacataaaaaactatcttatgaggagagctttaaatccaatccaaaagttgttggttactcccataacattcctgccactattgcaccagtgggcatgcttgccaaaccatgtgttattccagcattcagggttcacaattgggcaataccattgattgctcatctctcctgttagcatgcacagcacctaccagcactatgaatgctaggcattagaaatgagtttccaggttgctaccagctggatttcttcacatcatatacagaaaatgtctaactggctggaaagtttggtggttttacaaatcatgagtcacagaacttgatgtcatttctataatctgctgttttcatgatgtagttttattctctctctctctctctctctctctctctctctctctctctctctctctctctctctctctctctctccctcatgtcaacatggatgcaattgtaggggcatcttactccaccaacagacttgaggtaatggcctcagtgtgtggctttggtgtgcggacatgactgcttataaggaagaggaggggctccctgccccaccccttgggttatggtctcagtatcctggattgtagacctgtgcctccaggggcagaaaactgtagtggttatttaaaatcattttgtaaccgctccccaaataaatatctgtcattctttattcgggcgttcatggacttcctttaacctgccttcatgcaatgcaacacaatttttattttctacctattaaacacctaaatagtggtttgcaatttttggataaactcaagaaagtaatatggaaccatgagagcttatgcgaatctctgtgttgtgcagatgccagtcttttcacagccaacccaggccgattgagttaagcactggtagtaaagattttaaaagacttgcgaagttttacttggttttgtcagtgtgtgtgtgtgtgtgtgtgtgtgtgtgtgtgtgtaattctatgtgtccataatggccaaaactattggctccccaagggctggaattacatgtgtttgtgatccactgagcatggatgctgaaagtgaaactgtcatatgtgtttttaacagcagagccctctctccagctccataaggtaatttttacttctataaatatttggtcatagtactcacattttaaaaatgaccaatcatttctaaaatattatttttctcttctacatgaaataataaagttttcatggtgtgataagactttgctatattacccatttccccaaataggtagtttttgacaatctgtatgggtacattttgttttaacaaataattcatcgattttaattttaagatatacttattgttgaaattttccaaataaaagtcattttgattagggatgtcatccaagattaaactccttaaattatccaggctttatacctcactatactgtacttaggtaattagtcataatgctaactaagaaaaaactcaccattattagacatttatcatggccaaattttaaaatacagaaaaaagaaaaagaaaaggcatacatactgaaatggaatcatgatgtttaagtgttgatgaagacattcataataactataagatattttataaacacttcatatacaaagtcaataatggccaacataattacggcatttgtttttaatggtcttttaagactgaatataatagtccatcaactttttttgcctctagaatttgaaagataattagctgctttaattaaaggccaatgagagatttggaacagggagcccacacagaaattaaacctatgattaattcaatgtgctcatcaactgtgctaaagacagaaagcaccgccttgattcctatgaagagcacataaaagggtacatcaaaagctatgccatgatgtctattgtcctttcttatgaatatattgttgttcctgtagtcccctaatttatgaagcttcagttttcttctaatttactttacaatgatgcaaaaatcagtataagttcaattacaaaatgccatactttaaagactggattctgatctttgtcctgggtggcctcatgtggtgtgatgtcctcattcaatgcagggcagtggctaagccacagctcctgcttgaaaatgggttcatgaagaaacaggtcaccctgcacagtctccagttctatgacatggggcaggtaatacacattaaattttgagttataatggattgtgtttaaaatggatttaatgggatataaatcaaggagcatcagtattagcaatttctcttaataaaataaggataacatatctaagttcctttccttgttgttaatgacatttgggtttatgaatgcaaatgggctgtctatgctgaagaggtggaatgagaattacagcaatagatgagtaggcagaaagttcaggaacctgcctcatcacccatgagttaagtaagtgtgggtgatgcacatatacttttattctcctgaattgaccaaaaagattggaccttggcaatagttgggcaagcaatgcaggagacttggtctgcatacagtttctaagcatttatcttgtctagagctctgattacactagcctaggatcaagaaggctgctgtcattttcaccatactttttgatctactatggtccctatttaggattttagaaataacattttattcacaggggagagtcattctcttgaaaatatttgaacatcactatgcagcttagcagtggccttcttgaagttcccagcttcactcaggctattctgagtgatgaaccagttggctagtaccatgcataaggcaaccaagacaagacagctacaaaaacaaatagctaaaaacccttgtctcacatttcattatcaacagagattcaggcagtttcttgagtagttatgattactaacatttttaataaacattgtttttgagagcaatgtaatctccttggttcactttcactttgtgaattctctttgataactctttctaatttagataaagtttattttatttatagccctcccttctgtcactgtgctaataataacctgaaagaaaactcaaagtttagtttaaatttacgactgacaatgccatttaatctagaaggtagaggtagaaccaacactatcgtgataccatatgctaaaatcaacattaaaatccacctatttaaagacaattataagatgttaaataaattctgacatatatttttgaaatattattttaaaatactctagaaatgttctaggaaatgggctggggttatagccaagggtgtgttacttttatattttaatcttttaaatgaatttggtgcttctttgaggaaaaggtaaacttttataatttacttcatacagcattatacagattttaaatgacattcatatatatatatatatatatatatatatatatatatatatatatatatatattccagagacaattctatttgttctctatactaaagaaatgagtcaaatatcaaagaacagtttattaaagggaattctcccatgaatgatcagcagtgactaaataaattaatacataatactcctattcatttctgtaactcagatatagtatatgaggtggtgtcttctactatggagactgagaaatgcaatgtctagggaccagcatacctggtgaggacctccttgatatcaacctgtggagaagaaaaattgcccatctcgaaagcatttctgttatttctgttaaaaaattaaacccatccagtaaagctttgatggcctgattgtgacttcaaagtcctacctcttcatattgtcacagttccaagtaaatctcagcattagtttaaaggagagaagtatgcatatcaaccttaaggtctttaaatcttgaaaaagtctttcaatatttggactgatcaaagacaatttcaggatgtttttgtatttgttctctagaccttagttaacagcaagtatcctaaaaccaaaataaattccagatttaatgttaggttttctctcacctcctaaaacattttagtcaaaagaacacaatattgtttcatcagatgtcccaaatgttacaggacaattgctggctgcatcattgttcattttagtcttatagaataataatatagtctatattagggagattttcagtaattatttttatagctaacaaaggttataatggtagacaagtactctatccctgagccacatgctcagttaattgggaccatgtttttatatttccattattcttatatacacaaacagctgactttttgctatagggaatctaactgattttattttaatttatttttattaggttcatacaaaagtaactaaaatttaggatccatgaattttaaatgattataatgagtgccaacacatctttaataatcaaaatgataataataacaatcattatatatttgaagtttatttatccctgtaagataaacaccaatgtatcaggagtcaatgagttcttgaaagcattttcagcatccttctggttgtggatgcattttcccctgcaaaatatggttaaggttgttgaagaaatggaagtttgttagcaagaagtctggtgaatatggtgaatgagtgtcctagctgatttttgtctacttgacaaaaactgagccgtatctgggaagacaaaatcttaattaagaaaatgcctcgttaagttgacttatagatgaatctgttggaaattttctgattaatgtctgatgttcaaggccaccccatagagtagaggtgccaccacaggacagttgatacttaataatgtaagaaattcgaccaagcaggccatggaaagcaaatcagtaagtaataatattttatggtctgcttcagttcctgcctctaggttcctgccttgaatttctggcctgagtctcccagtgatagactgttacctggaagtataagatacaaataaacatctattttttaaacacagcaatataaatgttaactaatacaacaaggcaaaatttcataatcaaattgactcaccatttgaagtgtcagttttgtaaagtgcagttttgtatcatcacagaaaagactggggacatttctgttgaccatgtcagctgtacacatcacagtttagtgcgggaatctcacccattcacagagcatccacctcatttaatggtttcaatgagattcaaaaactgtagtggatgggatgggcagcatactactttttacatcccgatccagtccaccgtctctcttaggactcccctcctcttctttttcatcctagaacctagctcttcacttcataaagtgaaatgaatggctataattcatgaaaacgagaagtgaaactttgagacatgacatggcaagaatgcactacatattgtttccttcattatattatttcttttgtcattatatatgcatatttttattatggaaaaatgctagcttaaaatcagctgtagtcacacaattttaaagtgagtttctataggttataaaaatcattcttggatatccactgagtgaatgtggtccagaagaagagcagtcagcagtggtaaacaatcaagccagttggtggccaaaatgagccatttgtttatgtatctatttatttaaaatataatatgtgtgtgtgcatgcacacatgtgaacttgtgtgcacatgtctgcgtgtgtttggatgaaaatataacagcactgtaggtgcagaggtcagagaacaacttgcagaagacagttctctcataccgtatgggtctcagggatgaaactcaggttgtcaggcataggcaaaagaagaagtcctgaaatactaagtgaatgtatgttgcaggaataggaaaggccatgtggttgacctgatagcctcaaacccaaggataaaacagcaatgtctttccctgggatgcagctcagtgacaaatggcaaagacttcttaggggaccaaatgcaaatatttacagtgtatgggaattgtccactataccctttttccctggattttatggtctgaatattgctcccctacagagcaaggttaaccaaacttgtacccttaagccagctgtatgctataaaccctgttccttgtttagatgtatggaatataaccctactgtcttgttgagctgctcacaatagccctgactctttgttcaactccatataacaaacacactgagcttctgcagtgctgtgccttcaccatttgaagctcagaccacctgatgccagcttccctgtgcctgtctgttggtctgttctttattccctaactgtccttagtccagttcaagtacctggatccatgtttagtgacacacttgctgacctagagccatgtcattaacctataaatgaaccactgaatcacatgataacctggaagtcaagctcaaagatttcactcctgtttatgctttgctgcataaactccccctatttactaaatactcctctgacattgtctctgtgtaaaacacccttaggcatgaaataaattcacaaacattctaaaataataaacaaaacagcatcaaagctaagcatggatctctgctgcttgccaccagaacacactccatagaatgaaacctcagaacacctctaattggaaagaaaggacacctatttcccagtgcactattacagtgggacatgagaccacacacacacacactcacacacacacacacacacacacacacacacacacacacacacacacagacagagagagagagagagagagagagacagaaacagagacagagacacagagagacagagagacagagaaagacagagagaaccttgtctattaagttgcttggctgcaataaacaatactctcaaaggaaatggcaaccaaactgtggtccacattttgtttctgagttactaaaagctcctgagtccattttagagaggttagctgccaggttcaaaagtctcttctgatagtttaaccactggagattagaagaaggtcacttcaaatgaaagcccacgccagagtctcaacagagctgttttgttctgatgatctttcttgcctgttccaagcctctggggattttgcaaatcatgtattgcttagtatttctccatcaatctctgcaaatgaaggcataagaagtgtcatgaaaatgatgctacatatttgggtgatagtatggtcttaaaaatgtcaggaagtcttttatgtgggcttatctggctccggcttccagcccataagcactactgagtgtcatatttttcatataatgctatctcattttcacagcatctccctgttacaataaatctttccaccaaagccgcccaagccccaccgccacatgcgtggtctctgccagcagcccgagttctgcccactgcgtagaaggacaaaatactacagagacatattaggtacgaagctgcttggccaatgactaggatttctcatcagttagctcagccttaattatcataaatctatatattttataagacttatcttatagaggatgcctttcgctggcgcattatcttgccggtggctcgcatcccacagctggaggaggcaaagggcaaaggggacacttcctgtttcccctttcttaaaaatgagtctccttgctatgttacttcctgcctggaacaccacttctctactacatttaccagaatcctctttgactcctagtcctgcctaacttggagccattggccaaatagtattttattcaacaatcaataagataaacatacacagaagtacagtcccaatcatctcctcttttctgtctaaataaaaaggataacttatcttttataataactgaagaaaactataaccataactatctgtcttcaactctatgaaagacaacagaaggataatatataaactttagaagtgacagagacatctggctacctggacagtcatccacagttcctctgtaacgttggggcatccattttcagccttcaggccacagtgtgtctggcacacttctccattttaacaggaaccctttagtactgtcttgtttcgtaagttcagcagtcattttcttgtgggtcttgcatgtccagtttatacagcaacaaacagtccaggcaagagcagtttcttgcccaaatggctaatcttgccatgttgaaagcatacttcataatgacaaagaagcactgccttttattctttttattttttttgctcttacaaaagaaaacatttaattggggctgtcttactgtttcagaggtttagtccattatcaacatggcaggaagcttagtggcacacaggcagatatggtgcaggaagaactgagagttctacatcaggatctccaagcagcaggaagaagagagccactgggtctgggttgagcatttgaagactcagatcccacccctaatgacatacttcctccaacatgccacgcctactccaacaaggccacaccttctttattatttttaagtttttttatttttacaaaattataatttcatgtcaatcccttctccctctcccaccttccccaatctcccaccaccccagtcccccctctcccctctgctccccatagagggtaagggtagttacttttgctgccactttccaggggtgaggacaagggacatggtagtccatgaaagccaatacaaaggacttatgtggtacttacaggagctgttctgctcctggacttgagtgcttcagtgtctcacttcagaaattctgccagaggagatcagggtgggatggggattggtgggggtcaggggaggaggggaggttgaggcaactgggattgacatgtaaatgaagcttgtttctaatttaaattaaaaattaatttaaaaaagaaattccgccagactgtattgcagattgttacatttgagggaactaggtaaaagttatgtggtagccactcggttataagataaatacttgtggatttgtcattacttaagagccataatataataaaattcaacatcactgcattaccattgattttaatggatctttttttgggttcctcattatttgagcttttatgatttggctttgaatagaagaatttcttggtcttcccaaactgcccatctatcattgaatgctagaagcatagagcatttgtcacataacaggcatcttactaattttattcctcatttccagggaagagcgtgcttgctttctgctttgcctgcttctattatgctcagtatacacacccagctatgattcatcttccatagaatcaacaacaaatgaattttttcttctgagagaactactgcagattatcttactatgaagtatgagacgctttgggttttcctgtttaagactgagcagtttagtatgcactcattttcttttctaatagatttttaaaaagctttgcacacacagcctctttcattaatgtacaaagcaaataatcactgaatgttacttgttacccagattacatggataagaacttctcccctaagttttcattttgaccctttattaatcatgtaataaatcaaatggtgtctttaatttttgttcctaaattatcaggagtgctttcgaaacactgagaactaattgaattccctaaagactaatgtttatacttaagattttcttttttagacaaaaatcaatgaatactaattaattaatacatagaggcaaacaaaaataaagggaatttatagaactgtttcctttcttagaagagtggataaaatataaaaacaaaatacaaacaaaatatggatggatgttgcatatttattcaattatagtgacatatttacagagggacaaaaatcttccaggagactcatcaaactgtgtccctcatcatttggtaacttcttacatgttgatttaatcatgagtctgtaaaagaaagtcactggttatgggctagaagaacatctgttcctttccaggtctgacagtagggttccatgagtgagggacgatctcacagtgggcagaaatgctaagccttctggctctcagttctctaactctccccattgatttcatgaggctgaactctgaactaagcatcactgtaaccactagccacatttgaaagcagactctcctatttgttgttctcttactcttgtctctattaacttaaagattaatcccaatgactgtggtgaaagacagtaaaattcatataattagaacaaagtgtgcatagccaactttggggcacacatttttctgcagcctgttctttctttgatagttaatcttccctcttacctgaagacaataataaaaaagaaagcagtttaagaacaacagcaaaaaaaagcacaattctagtgggtttaattgaatttacctagcaatttaaaggaagtctgagaaaatgagcaagcagaaaaaacaaaaatacaatgccaacgtcaagaggaagactaggcatctatgagtaatggttgcttttgttgaataactgttaggtctagatttttattaaataaattagtatatgtattatatataattaagcacttgtaatctaagcaaacgctatttcacttaatagaatcccttttaataaaacataaatagtagtttggaaatatgtagaaaagtttccctaatcccatgttcaattagttcagaggatttcatctaaaccttgtaattggactccaatgtcctgattatcaacagccactcttatctactggacagtgactatacaggaagatttgagccttaatcaaaataatggctatcatgagagttgaaaccataattctgcaacaatttgtctcgaaagttatattttattgtatagattcactttgaaagtcaatgaaatttctctataactaagtgacttgtttccatttaaatttaagcagtgtccccgcatgtgaccagaaagttgatgatctgcggaattcttggaaagaatccatgactacaaagcctatatgagtgatgaggatgtaaatgatattgagagattggaattttgcaagtccacagacaaattccctgggaacatttttaggcctcttagtagctaattttgtcctcctctgaacatgatctaatatctttgtaaccatggggtaagtcctttagaatgtaaggacagacctccagtgtcactaactgaagagcccagcaagttgtcagatagcatctatggcctataataaagatttctccactttctataacccacctacatgacatacccaccaatatgcttgaaaatgtggtgttttatcactgcctttgtcctgttactataaaaagctcattaaattactatgttatttgaacacattatgtggctaatctgaatctgtgttcctgggtagtgttattcctattcagtccagaatgtaacctttctcttgttcctttaaggtgagagctgtttctttcatcattagtgtcctgtaagtaagggacagagttcacatgagtatacagaatgggatgagagagacttcctttaggataatatatagcacagagaccaatgtcctctatggaactgtctctacaattggccaaggagaaaaaaaatagcatgtgttctcacttagtgtaaatatccttgtcctgattaaataatcaaacatttaatttacaaaacttttccattcaaaccatccatgtcctttgccttttctcagtgagtgacattgaatttcatgttctttagcattccttcagaggttaagagagtatcaaccatctgactgaattaagcatgctgtaaggttgtatctctattgagaatgaatagtaaaacaaaaagcaaaacatggtagataaggacaatatgtgattgccatcaatttctgtcatgcaacattcttaaaggtttgatggaacaatttataaagtattggtgaatgcctgggtattagataccagtactgtcagtgttaaattattttatcattagataataccattgtgttttgtaaatgaacaactatattcccgggactagagaggtagtctgagctgaacttctgatatctccaaaatattcctacaggaaaataggtctttgggtagagaatgggactgagagtcaagactagaaaatacttaaattagtaagcaaatagcgtgggagagctcttttcactgcgttggcctctcctctacaagcttaaaattaattaaaataattttaaaagttagttactagcttaaaccattcctgtgcctttcagtattttcctaaggctgacaaatcatccacgggtaaataactttgaaacaacaacaaaaaagccaaaccaaaatctcaacactaagtgaaatctctcacagttcagtcttctcaggaaactaatgagcactgagcaagagtggttcttggggggctctgatattttcttgatgtagatgctacatgagatgaggaatcgaatttcttatgattgggaatagttctacacagctgtggttgaaagccattttcccctttggaataaaccagaactgaagaaccacttcagaaatttgctttaggtcagctctgtggtgtgtgaatttcaacaatgaaatattcaacattaaaaacaggttactgggcttcacaagaaagataagaggataaaataggcaaagaatatggggagaggactcacactgtctaggggaagaggctttttaggtaattagtttttgcccctgaatacaggtagatacaactaagatctctaccttaagtcagttgttttgtgttggtatcaagaaataatcaagttaccatcattcacacatttcaaaaatagtttcataagcatatgtcttttaaaaagaatgaaggagaaataaagatacaaaaaggaaaagagaaaaatttccatgagactaaatattggataacctgtatctgaggtctgacaccctctctccctggatggtgaatgtcaatttcttagtttggtatgtatgaagatgaaaatctcttagttgcatagacattgtggataacaaagtcatatttacagcagcaaagctaaatttttcataaagtaacccatatatgagttaatgaaaaaaggttttaagaattactgctagtgtggttttcatacagttaataaaacagcattgtggcagttagcagaagctagtacaaagcagagagtttttttgtttaatcctgtaatgtcttatttacacaagaaaggtttgatttctcaaatattgaaacatgcttctggcttttgtcttgttctgtgctcagccttctctttgatacaggagaagagctctgatttgggttcattgccacagtagtcacaaacctacctgctaacaaattcactcatgacccaaacacagcttgtaaaaatatagggtttgtttttggtttaagaaaatgaaaattaaaagaacaataaatcaaatgagaataaaataaaaagaaaattacaccttctgacccgctgcaattctatttttgttttgttttcagtgatcaaacactttttcatttctcctgacttctaaatagcagtaattatgttgtgaatattacactgtaattttaatgatgccaaaaccaaaacttttatataaatttgaggatttgaaaattagggttgcaattactttaggtgtccagagtcactgactcttgttgtttctcacactctgtgtgaaggcagctatcaaagtgtcatacaatcactgtcagagtgtctgctgcatggccatgataaacttatttgatttttaatctggatctggaaagtgctagtctagagatccataattttaaatgttaagtcatcgaccattttagagtatagtcaccaaagcacacaaaagtcttgttttatttgcatccaccttgtactccgcatgggagcacaggccagaagagggtcctagttggagggaacaatggcagcatgggcctacaaagaggatatccggccagaggctcctttgatctttagaatgctccctcctccagcagctcctcctcttgcaatgctagcaagaacagcaccttctaacaagacttcctgaatatgcttggtgttaaatgaggcaagcagaaaggcaagctcatggctaaaataaatgtgggaaaacatcataaaacaaaactaagcactgggaggacttctctgattctgtaatctaagctaagtatagagttggaagctacagaagagcaagtgtagagaatgtttctgctgttttatgctaaaagatgtttctttcccattttgtactgaaaattagcttattgttaagatttatatctagtcaaattcctcatgaagtcatctccagtcccctcagtgtggtggactggccagtcttggctccaagcccgaaagccattaggtttggcctgagtgggggagggtgtgcttggaaactcctagcaacccaatggagataaagaccaaacacaggcatcttgtcatcattagagagctctcagttgcaagttgtaaaactagagtctcttgtttatttaccatcttcttggctgtctcttaaccatgcttccatggccatgaagtcgtttctctccttctgacccctctttctgccccatagccctaactctctgtcctcacatgttacttacatacatagcacctccgcccaggcctcagaattcatcaatacgtttttgcacattactgactccaggatctcaaaaagcctcgtttccattacacactcccttcttttgctatgccagaactatgtgtttgttttccagaagtaaaccaccttgagatatcagttcttaagtgtcatagtggggtggcacatctgccctgagtgttgaagacattcagtaatgcttaacagttactaatcatgtttgtctcaactacatattaattatttcaaggattattctgaaaaaatacatttttcctaccatttaagaggggtagattggactcttttgtttgtttgtttgtttttttttttgcattgcatgttttcactccattcgatattgcttttgactcaccagtagagttcatcaccataatccaaacttatatcaaaataattccagacaagcaaaatcttgcaagggtgcctttattaagttttgcattctaattccagctagggtcaaaatactcagaggggataaccatagggagcagagcaactcactctgtagccattgtgcatatggagtaattcaaggagggacagagggacaaagcttaaatcacaagtggtcctccttaccaagtaaatattccaaacattctacaatggaaagcacatgaccatgacagagtcacagagagcttgcacctaaatccatccttttagtctagggcacgaattggggtcacatattagaaggccaatgattctttcagattaagctacatgctttttatgtgtgacattaatactgatgaatcgcttatgtttaagaaatcaataaatgaaagagataaaggaaaacaccactataatggtgacaataggagatggttagtcatttctgaagggtttctcttcactctgttggcttctttaggagttcttctgggaaattttcatgataactgtcttgagctcagtgtattcataaataccatgctcacccctagaaagggaagaaaaattgctcataagcatggttatgcactgcagcataaatcaaatataatttacataatttggtgcaagttttttgctttcttatctgagtagaggcattgtaaaatgtttattgaacatagtatagttcatataggtgctagcttatcataagctttatgaccaaatataaactccccagtggaaagcaatatactttaaagaattctgtgctctgttttttttttcacagaaaatatccattatttgcattactttacttgaccatctgactaattacccgaattataattcaacctggtcaggtttttatcagatcaataaaggaagagcgatgtagttcatgttgtactgtatgccactgaagaccagcagaacaaagcatcagctagagcttgcattcaccatttgcactgtcacaggaatggtgggaggttagaagatgaccagtatccactttcagtcagtagaagctgtagttttaacaggatctttctattcttggcaaaaccaccacctaatttttcttggtggagttttctatcttttggattgattgtatataattttaggaagaaaagaaactaaagattgtcctgattcaggcttttgggattttggcagaggttggctttctgtattcatcaacatcatataataccacaaggaaatctttatgtctaccataagagaacagcagctgagactagtatatctgtagataccacagtaactttaaccaggttttaaccccagacctattttggaaattatgatttctttctacatagtgcatgatttatctaggaagattgtactcagttatgccctgcattgttttggtgagaagataaaattacatgctcataggatcactctcaacattgtaacatctatgcacacagatttgcagaggagcaggattttggtcctttaccagcactactcccgaaacccttctcctgtatatgtagaggatgtcttattctccccagaaacacaatttccttacatggattattctgtgggtaattaaagttttgaaaatgcatcttgaatgcttcaatgagaatgttttttcacagtaattaaagggcttcccttcagctctctaaattctattaaaagatagtattttaataagtgtttttatctcaaagaggtagataatttaacccatgattttgaccaagttattttccattctatttagagctttagtgtcatccatcactcattggaaaatcatatgtttaactgtgatcacattgaagctgatactcttaggatcttgtgcatgtacagtttccaagatagaaacacagtaacatctgcttataggtctttttagctcagaaagactatgccttgtgccttactagtctgtgctctccagaccctactatctctgtttctaaatcttcactacacatcaactggaccttttattgaatactgctgatcctatgcccagctctggatgaggtatgccactgcatttccactaaacttctgtatggtctcatgattctcatcacagaccatgtaatatgtgagaaattaacaagtctcagagaaactgctagagttgacaaatataaccaagcaaaagaataaaccattctagttcttgttttaaacacaatgtttaagaggatctccctgtcacatcactagactttgtggtttccccgtgggaggtctgactctctctgaggagtagatgaggggtggggtgaggagaaggtggggggagtgggaagatgtgaacaagagggaacagggattggatgtaaaataacattgttttaaaaataaaaagaataaaaagaataaaagaatatctccctgttcccattttttataaattgactgaagaaaaaaaatggcctgtgaaatagagagtgattaaatttggaacattcccaagtgaaattagcaaacaaaaagccagatcttcaccactcaatcttttccagtgccaccactgaacatagatccagaaatcaacccttgggttccctggattagcagtgaacacactgggaactgcatatgcccaattttggcccttgttgccatctgagttaattttgttttcttcatatatatatatatgttttcatatatatatgtcttcatatatatatgtcttcatatatatatgttttctataacatgaagaccatgctggctttaaaatcatggaagtctgcctgcctttgtctctcaaatactaagattaaagagtaattcacaatctaattcttgagggtccttagagatggttatgtcagtaattctctggcaatagtttacaccaaatgactcggtttaacacatgcacaagttattagctaaacttcaccagaagcatattagtatggggtaagcaactttaattcattaaagtgctatatttatatatctagaatgtttccacatttatttaaatgcttcttaagtttatcagtttacccttttactttcagaaaatgactcccgaattgcttatagttgcttatatcataggcaatcctaaaagtagacaacaagcagctaccttggtggggtactaagcactgccctttatggacagtaagcatattccttctgctattgcttttttgcacttttgaagtacttccaaaattttaaatgttattttctctaaaaaactccaaggacgagggcaggcgtactgcacttaagatagtgaaaatggcacaaccttcttggagagacaatccttttcacaaaaatatgtttgcaatacaaagttttacttacagttcacgtccatttccagacatcttgaatccaccaaaggggcactggggtgacagcatcatatagcaatttacccttaaggaaagaagagaaggacataatagacaatacttaactcaccccataattacaaagttggatatgaaaagaatcagagttctctttaaaaactccatcatttagtataatatacccattgggatgagagaaaaaaacagaaaacaaaaaacacagtgctgtgatttcgaatgcagaaaggaaacgagtgttaacctagaaacaaataaatagtacaactctaagagtgaatagttataaagcaagatttgtcggaattacaattggaagaaccaatgtgccatgacaggagtgtctattttgttggaggctgagttttgtctgctgttgtttggtaggcagctttgtaatgctcatgtagttaacaaggctaaactcaaccttctttagaagttgcagaagtgtcaaaatacatggttggtttcattaattggttaatatattgctttctcaaaagtgttggcaggaattggaactaattagcaattttaatcagattttatagaagacatgaaatggatctatagagaagtacattataaaagcatgattagaattacagtgaggctcaacagaagatcaaggcaagagtggtggtgagtccagtgtagttttgcaggcaataagttattactttatagaaattatattaaagaaagtggtgctttatggggctgttgaattttgtcacatgatgcaggaaacatgctatttgaagtacttggtacacagtaagccttcagtaagtgtggctgatgaacatatatgatatagtaactctgaatttactagtatgcttactacatgaaaaatctttattaatcaatagtcagatgtatcataaaacaaaagaatttgatttcattaagtgtcagaaaatcaaccatactcaaaacaagaaacaacagactttggcctggtgcttagtgctaattatataataacattacatgatagtctaaaaagtgttcttcaaaagaactatactcagagtaaatcccaatatatattattattgagaagcttgactaatatcttatgtgttaaaaataatgttacatgtacttatttattcataaattcattcatttacaaatttgtttaatgaatacatgtatacttttgtctgtgcaagtgtgtgtacttagagacctgagggaaacactggatctcttccacaattggagccttatatttcattaattagctttttaaatttcacttatattatagtcatgggtaacataaaattcatgatttgtttttcaaactattgttttaaaattaattttatttttgagaattttataacatttgagatctgtgttcacactgtttccattcttcagtctaaagagtccattcagtatagttatatgtgtgcatgggcctgtttgtatttgaataactatcttattttctgagacacagtctcactgagccaggagttcaccaattcagttgaattggctgtccagcaaacacctggaaaactccttctgtctacccagtaatgggttacagccaagcatcaaagcctccaggtttttacatggcttcagggaatctgaacacaggttattgtgttgaaccaagcagcacttcctagtgagccattgcctcagacccaggctacctgtttttaagttctcagaagatacaggctgagaatctcttatctgaagctccagaggcctcaagtgtttcagttttgaagttcttcagattatggaatgtacacatagattttattggttgaatagctctattattctaatgggcatgtgagtgttcctggatgtatgtatgtatgtctaccatgtgtgtctaccatgtatgttttttggccatgcataggccaaaaaactgtcaggtcacctggaactggatttccaggtggttgtgagctacccaacctgagttctgggactgagtttgggccctctgcaaggtcaggaagttagttctcttaattgatgagtcaattctccaattctattcccctatttctgcaaaattaatttatttatttaaggtgtatatttgtgtgactgattgtaaaaggacttattagagggtgtaatgacctggctctatgaaatgactccactagtcatttcatggtctccattgagttccttaacctcagcaagttcctggttttaccacagaagtggctaataaatagttgtgtcagttcagcttaaatgatgaatacaagaaagacactgtaaattttagttactagtgactaactggtgacttcctttgacagaaggaaagatttttaaagctatcaagagggtagagaattgtttggtcatgtttctaggatgcttttccatgcctgattttccttaactggactatctgagaaaatagaaataagctttatgttattgctgccaggaaagagggaaagcaggcttaatgataaaaaggttgctgaggaaatggtctagggtgtagagtcaagtgggcacagcagtagtttgagaggcacagcctgtaagtgataacttacagtatcatgtaagttaaactataaaaatcaaagagcagactaggacaaaagtgagagaaaattacttcacaaatttgttatgatcttctaaaaaatgccatgtctcaaaaacaaatcccagagtaagaatctactataaaaaacaagaaaaataatcatttactatacaagctgaataccatcttgcctgggacgcagacccataatcccagttactcttgggcctgaagcaggaggatttgaacttactgagttgctgaatatatatatatatatatatatatatatatatatatatgatggaggagacaggactgaggggcagagtgcttgcctatactgcaaggcacaagatacagtattcactgtgaaaaagaataatgacataatgacaacaacaataaattttggcatacataaagcaacaaaacattatgtaacagaattaaacttggacaaaacaatttttcttttatgttcattgttcaaaataatgcctcataccttgaaattatctagcaattcttacaatgtacagaataacattcataaaaggtttacacaggtaacttgaaatagttggataaagttaatttggcttaaaaataagacaattaactttcttagccagtcagataatttctataaatatcaagtctgaagggggtcaactcagcctgcccatatgtctgatgcaggaagggcaccccttactttagatggacttaccacactaccccagcctgcagagcagaagacacagtgatggccttgtccacatctttcgtaaagactcctgctgctaggccatagctagtattgtttgctctcttgatcacatcatctagggatttaaacttcatgatctgttgcactggtccaaatatctagatagaatgatatgaaaacaggtttacactatatatactacatatgctttaaatacactagatatgcttcactagaagccactctacatggactatgtgtaaggatcagaaccaatggccatggccaatgaacatggaaacatgttgtgatcatgtgtgacattctctatgaagcagacaccaatcatgatggcagttttgtgctttgatagagctgttcaaaatgtaaggactgaacatcaaatcactatgcgcatgatttccttggaaatatcttccgagttaattccagttttcttcattgttcaagttactgcacaaggcaatatgaccaaaaaagcagtcctttgctctaagagtaacaaatagacaattattgagacactgtttatgcttttaacaccagtgtattattgatttaaacatcacctttcaatgtatttgtatcatttcataattataaatattgtataatatagcacaggtgtttattccttagtgtcactcaatactatacaccattactaaacactggaaccactccacactaagtaaagcttgaaatccctggcagtgactatcattactcttgcttattccagtgttatcagtatttcatttcatctggaatctagtcaataaagcctacacacaactcagtctatatctcaccccacaagtaagtagaaacaactgggttttttcagggatgccattgtcctttgaaaagatattaatcaaaattaagtaaaagagagtattcttggaatgtcagtacactttcctgggaaatacaagcatagttggcaaatactcagcgatgtcaaatggttttctgtttctgagtcaatatgagtggtatgggacagttagcagcaattccccgaaggctggggaagattctggggttctaaactctctcatgaccctgtaactgggaaacataacagtgtgagcactgtaaatggaaatcaattggagcagagctatggtaggttttctaagagctgtagcaacttagcctagacagtatgggctccaggctcccattctgaagcagcaaatgagatattccaatgagtaggttataggatcacaatcttcctagaataaatattattttctgttttattgtccttttatccatgttaatcaaggtctacaagaacaatagctctgatcaaagaagatctggatgataaggtcagaaattcaaatgcagttgaggagtgaattgatgcaaacaatctaagtgtgttggattatccacatacacgatctttatttctggtgtttatatttatttcttcttcttgtgcagctgaatatttgccctttctccttatttgatgacattgtggaggaaagaaaataacctctcagatcctctgttgtatcagggacatgagtataaattcacggaatggagaaattatggttctgtacagttgagtcattgtaatttcttattatactgtagcagtaatcctttcattgtttaaggcaaatgctcatacctctgcatatagcagaagccttcataagcaagacatatattagttactattttaatcacaaactagttcatttttgttacatgttgtttattggttatcatctttatggatcctacttagatggcactccacagaactcactttcacttcccttacaaagacagtccactctctctctgtgaggatgattttttttttagttctttttataacagatcattcagtgtatagtgtgcatattggtttctgtttttacaaatgacagagtcatttcccatttctctaaggctgcgaatgaagcacctatagaagctgatgtggactttgtgctgtgtttgatacaaactgtttgtagccacttggattcctcctcactgatcagtcttgatcacaaattactttagatgttatcatcaagcattttagggaatgctgttcaaggaacagaacattatagagagacacacggtttacatacagaaggatctggatggcccagaaacagaaccacatggaaccattacctcctctttggcaatgcgcatgtcatcagtaacattggagaacactgtgggctggacaaagtagcccttgtttccccagcgtccaccaccacactccagtttggctccttctttcttcccactctcaatgagatcaagtattttctcatgttgttccttgtcaatctagttgaaagaaatcacaggggggaaatgggaataaataaaaaaaaaaacattaaatcagtggtttgaaagctgagggttacagctatcagaaaacatttattttctatggtcttaggaacagcagacacaaatttatttttgttgctactttgtaactgcaattttgctccttagtggtgtctcagttcctaagaccaccagaaatatgtgttttctgatggttgtgacccacaggttgaaaatcaatgcatttatttaaatgactcccatgcctaggacactctcttaagtttgacagttcggcagagtttacctcagtctgactagtctcaggcatgttttttgttgttgttgttgttgttgttttgttttttgattttgttttgtttttctgtgaattttttttaggaaggaaagcttaagagtttttgtaaacttagtatatttacaaagtattgcaattggcaaggtagaactatagggactttttacacatctgtcatttactcaccctggatgaaatttgttaatgatttagcacatatgcctgaacaaaatcgtgatgagaaaaggatcaggtccagtgggtatgtcactttaatagcagctgcttttgactgttggaggcctttattcttcacaaatgggatctgcctattcttgagtcatgtctactggtctggctgccctttcatactgtgtatgagcagaggttggggggtcttgctccattcagttcagcaggttgcataccagtttctaagaataattgattatcatcttcctgttccattaaatggaccatgtctaaataatatgatcattatcacagaagtatcatgtgctaagtaatgttttgcataagaaagaattaaaaagggatctgatttctggttgacaatatcagaatcactaaacactcaacccacttgctgagacatacaggtttcctattaccccagttttcacagaagcaggaggtaaatgattaagtgttggattacagatcatctttgcaaactgcctgctttaggtgtgatagggttcacataaatggaacaattagagaccaagggactaaaaagaggggttcagatttggggctggtgtattttctgtcttgaatagataactggcattctatatatctttggactctgtcaatcttctcagtattcaaaggaccagaaaagtttacatgatgtgctctctaattgcttatctcagcctctacatttacttagagtaaatgttagctgctatcagttgctagttgagaaaagttggcatagtactttgtcaacctcttgctccaaatgttcagtgtgcaaaacttaaaagaacattcctcaaagataatctcttcatttgttatctattgtggaattccaggggttggtttaaaagtcaagacactgatattactacatgcagtataaccaggctaagttatggtatcatgtaggtatgcctaactgggatgttctggagttaatgtgcagccaggtatcctttaactccatgaaaatctctgtcctagtctcagaattttttcaaggtgtgtcctgaaattcactatttttcagttctgtttaacaagatatatttcccaactcatagtgcttctctgtctttaaccaaaaattaccgctagggagtccagtctttgaatatttgcttcagaaagaaggaaggctgaggtatatcatactagataatgggagtaataatagtaatctgttatcataacacacagtctacaaaatggcaaatgtaactctgctgttataatggtgttaaaatgtgtgttttgatttttttcagtgtgagaattttttgattccttagattttatgtgttagaaaatcatatgaaccaaaaagatacaagttcatctatggaaaccatatgttcatacctagaaactagagatcaataagtaccttgaggatagacatatacatatcttattatttctgagaagagaatggttattcatgctcttcttagaatactacaatactacatataaaaattgtcatcatgtattattatgtataattgctatcatgcagagatagatttaattggtattgatgactatacaaggagataaacatcatgttggctatgccatgcagtttatttcacttcactatataatgaatccacaaaatttatactactaccactgcttaatcaacaatgaaattgagtggagggaagttcatggtttttttcaaataaaaatattgatcattttaaccttttatggatgcacttgggtccatgaagacaaataaaagtattactttataaatgaaaacaatatgtgtatacaaatactcatgtaacacaatatcaatgataatatattatatataagatataaatactatactcacaatatatagtatagtataatataataatctgccttcaaactaaaatgcttgcaatttgacatctttaaaatgagaaaaaataactattgtaaaataaattcctaaacaaatgtgtttggcattaatttcccctaaaattatttttgttgtgatatttatgaattctcaaactctgtttaaaaagtctcagttactcttccagcagtggatgaagcactagtctaaagcactagactaaagtaacgcttctcataagatatttcttattacagataaaaacataggatagagaagactggggtctcttcagtcatttgcttgtcaacatgcctggctgctctctgtatccagagtaacctctcttaaaaagctatacacttacagagagtaaagccatgtgacagtcaattagaatatgggattgtttactttagaatcttacaattcagaattctattttcatttagcctataaataataagcattgctactcaatagaaggctatggttgaataacacagaccccttgatgaaataaaataatgactattgttcaatgtgaagggtttcagataatctgcttctctaccctttgtcatctaaggacatacctattatttgtctacctagtgtctatcattcatctacccacatatcatatatacttatctatctatgtaatgataagatgttttatatttagatagtaaatcaatatacatttaagaagacaagtggtgacaacaaatttactaagaatgtcataattttttaaatattagagcaaatagggatttgagaattagcaaatatggaaatcagcaactatctttatacactcactgaaatcaataataaaaatatataatgagactgagacaatgtaaataattccttcacttgctagttatcttggggtactgctttagtcctacacatttcctacatgggtactttgattaaaaagaaacactaagaggtttgtccaaattatttatatgataaagtctaagatgttactgacaatgtcctctttgggatttatggctttttcaaggtactctcatgagatatacatagtagtaatggcccctaaatttgtactaatggaatttggtttgcagttgttaaataactcaagaatgaggtttggttccaattcaacagtgagaaacagtgtatcacagttaatgtaaaagaataacagttccaaggtcaatgtccagtacctaggccacatctctcaggaacagctctaatgtcacttggggacagtaagttcattgtagtgaggtttttctgcttactgttgggtggcatctttcctctgctcactagatgtgagcagatccccttcacctttttgtaattacttaatttgtctccagataaggtcagtttctgctattgtgggggctgggcacaactacctcaggttgaggctcactgttttaaagaaagatccagagacaggcattaactcagaaacaaagctccataaaccttgagtagaccataacagactatgaaccaaagctgtacagaatgaaagggtgacctttgggctagagagacaaagatactcatatttacagtgaatctaactacacagaagaaactcggagccccttgggaaatgcctgcttctaataactacagaagcccataaaccagaatcttcaagaacacttacagtattacactagagaaactgaggaccctgcagaggatccaggagtgctcgagtgcttatacttgtatagcgactgctgaagtcaaagactgattataagggagaaattacagaaatttatgtgaacttcgaagaggtctacaaattgtaataggaaacaaaaagcatacagactgaagagggcaaggaactgataatattggcaaaatttcctctttacctcttgttttttgtgtgtatgtggtgtgcactcagttataagtatgacagtgcaatgtgtgcagaagacagaggttgacattacatgtcttttactctcactctcttctcctctctatctagataagctatctctctgaactcagaacttaagagtttggctattctagttagtcacgttgccttgggaaattcctgccatatttcatgaactctgaactaaatgtcagttaccaaatgcattcaatttttaagtgagtgctagaatctgcactctgaacttcatgcctaaatggcaagaatcttatccaatgggttatctcctcagacctttacatgtttaattccctgcattattcctaaactacttctagacacataaaaaaactgataagacaaaattagaatgatttttttttcctatcggaaattagcctctttacatgaggtcagcgtaataatgtgtagatggaagttctgttccacccggtcttgtgactgttagaagcaagatatcaccatgatcatgtccactagcaaagtgtatagctaagaggtaaagttaactctatcaaaattagttctaagttgttcttaattcttgtattgcaatgcttgtcttttttacctgagggccttggtttattcctgtgttcagaggatttccaagaatgcatttcttagctcgctcaacactccttctcacaaactcatcataaattgactcctcaacgaaaagcctggatgctgccacacaacattggccttgatggtagaacaccccattatgtgcaaactcaacggctgtgtccactgcaaaggaaatattcacattacagcagaaatattttctatagcttatatgtgtgtaaatgtgctcacacacatgcacatacactgaagagatggctgagtggttaaaagcacctggagctcttctactgtaatggagttgagttcccattgccaatgaaggatgggtcacagtctcctatagctacttcctcaggacctctgaaactctcttctggcctttggaggcacccacacatagacacacatatacacacacatacacacacatacacataacatctaaatcaaaattaaatttttaaatgtatttttttctcagataaaaaatggtgataggttaaaaaagactcaccaaacacacatagactcaacatattccacctcttggaagccaaataacaaaaacaatcttgataatatttttattttcaatgaaataacatcagaaagaagctggaaagagaggctaggccagtgttaatacagaccttactaagactatagacttgattgtaagaagaaatagcaatgtaaataattttataactctttctaatgattgaaatatctgtgactactttcagattcagattttagctaataaaaatatgaaatcttcccttaaataatttcaagaaattcatgtactttggtcaaagggaaaaaatatctttttgagaacaacaactatcaggattcagaagaatcacccaccatatgaattttcctctagacaagacacttccaaaatctatctaaagtctatatcatacatgcacatgcattgcttagtttatttggtacaatgggaatagagattttattagaatgctgttggttctaacaaaataaaaagaaaggtgtgtgtgtgtgtgtgtgtgtatgtgtgtgtgtatgtgtgtgtgtgtgtgtgtgtgtgtgaattttatgaataagaaagtttctattcaatattatagaagtggggtatcaatctgaaccaatagtaatggcttcagttgtagttagagagagataaactaggcaccctgtcatgtgttgaatagtaacctggaagtaaattctaaaatctgtagtgatgatcaccacagtgacaataacaaagataatgcaccatttgtgtttataatctagttgtaattatgcagctaaggaagtaagaggaaaaggaataatggaccatgaatttcagtgaaattactcctacatgataagtacctgaaaatttgatttgttagtaaaatcagaaaggtttggaattttacagatgggatcacatccaaatgataaacttaatatatttcaacttcactaacattaattgaaaaaatggaaattatttaaatggttctaatacactttattcttcttataaatggtcctgagtaaagggagaaagaaattatgcaatttatgacagctatactccttttggctccaaatgtctccagtatttcatgccctcagcacaattaaagaatctatgatacaaaattaccaaaaccacatcacagatcctagatgtgatctaggatcacatcagattgacttactacctcagattgacactcagaagtagtaagctattccaactcagggcaaaatcttctctttattttgttggctgtatactacagaaacaatttgaaagctttgcagagtcaccacagactctagttaattccttaaaccttgaagcaaagtcatttgcaaggctccaggtgacttgtgacatcatcaaacatcaggaggaagaaggtgagatgctagcaagggacttatactcacagtcagcatctgcaaacacaatgcaggggctctttcccccaagttccagggtgaccctcttcagattgcttttccctgcagcttctttgattaatttgccaacctgaaagcagacattgcagagaaggaggcttagtttcttcacatgtcaatagattgttttaatactttccatttataggatatttataccaccctgtaatttaatttggaagaaacatgaaacggtgtcattcaggatctggcaccttcaggtgtaaaagcctccaccatcaagtctgaaaatatgaggcattcagaaaatgctcatgggcaggaaaacagacactgcaacttgagagctgactttcatgtgtgggccgataagagtttatttttctttttcatcaaaactttgtctttgtatttgatcagaaatacccccaaacatctgatgcattgacttctctacctctgatgacatttagagaactcagttcttcctttgtttgggctcatctcttagcacagattctctttgagaccttctctgaggattctaggtgggcatgattctttttcctctggtctccaaaagaaacacatgaacatccatctggaataccccaaatggtatcatacacatctgcaaaaatttcccaatagactgtcattttctatgtccctgtgtgtttatcacatattgctcactgttcatggatctcagtacccccttcactatggtgttcttggccctatgcttctgtttctcctacacatggcactcagcacagtggatataaaagaaagaggcaggcgctgatccctgtgttcttcctgcccttagttggaatcctgccattctagtttcttccttaattctagttccttcatctaaaagaagacattgatttcattttattttaatttctctctttgggtcccttaaattgaaggttgttttctaaaaaaatagttcttcttttccatccaaaaattaaagccttcatgatcattagtacttccttctgttcaccatgaacacattctactgaaaagattttacccaggtgtctagagatacccctttgcttctttaatcctctgtgtttgctgggcttttctacatgttggattttaatggaatgtttctctcacacttatgactgttgagattatttctatgtggatactgcattgcaattgtgcatttcagaaaagatattcactctactaagattttcattttattaatgatctgaatttaattcctgaaattagatgaatagacacaaacaaaactagccatggcctggggaacctctacctgaaatttatcttccctacttctctttcagactgttgtcttccttcgtttctgtcctcttatttctgacagtgtatccctgtatagctcagactggcttgtgattctcctgcttcacttcccaagtgggggtagtggtgtatgccaccatgtcaagtctctgtaatacaatctttgtgactattttcatttaaaaagtttctgttttctctacaaaaaaattatctttttggagttacctgataagtttagtagaaaagttttgccaacatagctaaatcttgtactggttaatggagtaaaaccagaagacatttcctaaagccacaacacacatggcaaagaatgtgtaatacaatggctgtgtagaaatatgaaggaggaataaagattttacatacattgcacatccaagtggacaacttgaagtttgcttgaattttctcagaaaacaatcaaataatttctatcttgtgatttttgtccccttcctttgaaaaagtaaaattttatttttcagaagaggacaatgagaatggcagaaatctaaacttgctgcatcctgtgtgaagcagtgttcaaaaaaaatgtgtcttacactgtgtggctacagttctttataaaaatgaatcatttgaaattcttaatatctaaactacattaaattttttgctaaattgttttgttgttgtgaccacaagagatgcaatatatcatttgcttctggattaagattgattcaggatctttagtctaagtcaggttacaagccttgaagaaaacaaatgaacaagttcccacagagcatttgtgtgggaataatgctctgttttccctcaccgtggtttttaaaatcatgttgttaccattttgtcatttagaagccaccattatttggctaaccctgaacaagagtctttgaggctagccagataatagaaagagatcaatctgcaaggacactcactgtcctgcaagggtagtgggaacacagatggaaacattgtctagtttatggatttctctgaactttgcataggagcagtgtgggaactcttggagtcaggtaaaaggagcagataaccacatacaaaccaaagcctgggaaaacgaaattacaaggatattttgagttctcagaggggtactaaatgtcttcttctacaggctctcatttttattatgtaaaactgagaaaaacagatattacattctacttttcaaataaagaaagtcaaaattggcaaagacactgaacttttagaggcattgtacttagagagttagattggaatttgagcccagattttgcctgatctcctaatttccatatttatttgggagtttttaaagaggcctcaaaatggtttatgtctcaggatcacttatagcagttgaacattcatgctacctctggggtcaggaccagaagccttcagcatagatgccctggagaaggcacaggttttggacccagatatgcccatggcttccccattgcaggcagtcccaagattctatctgtctgccgtttccttccctgatatatcacaatgacagaagttatcagcatgtcttgtacatcctcatgtctttttaccccatagaaaattctgaatacagtaattttaagaagaccatatgtcaatcatagattttcaccatgtactatttttctactgtccatgaaaaatcaagaaaatgtgttttagaaggtggaggattgaataaaatacaatttaatgtttatcaattcaactttggagaagttagttgcttcgatattttattaaacctctccatagttgaattgccatagggtcagaagtcaggcacacagaacactgaggttctccagaagaaacatagaaggaagtgaattttggtccccttctcaggctatgctgggtagacagtcccaaataagacgctaagggtgagactatactatttagttttcttcttctagaggttgtacttacattcactcatatgcatcactgtttgaatttatatgtcctaccagatactttaccactcatcagacaacctcagaggcagtatttccaagagatagtaataaacacattgaaaatggtaatctttctccaatagtaacaggtattttcttttatcctaaatccacccacttgtctttgataaacatatttcaaggacagaatgatgaacaaatcattgaaacaactttttgttttcagaagtgttggttaagaaaaagctgcgcagtacatgcttgttctcattagagatgaggcatccgaagactggtactacctgtgttgatcccgtaaaggccaccttgtcgatgtccatatgagaggagatggctgcccctgcggttggtccataaccagggacaatgtttactacgccaggaggaaaccctgcctacaagtaaagaggcaagcagtcaatggaagaagaatttaattctcaacagagacacgactacatgatccatgactgaagctgctttgttattctaaccttaggagttttttctacccagaaaatttcacttaagtgtttattctttgttattactatttcttttctttttccacatgaaagaatactcaaaggtgataatactgaaaacactttttgccaaatccatatatcacatcaatggatcatagctccaagattagctgtgtcaaatgtcagaagggagacctcattgagaaaggatcctgaaaagtatgataaagtgtatacatagagagaaggcattcagtatcatcagcaaacctaaaaatctaaagagtggtcacactttcagtgcttgcccattgccttttcaggcagagcagctacataacaaatccctagaggtattgttcaatcagtaaaaaatgacataaacaaagcctctcttcttaggatgatagaatgattcctatcctactgaaatcaacaaagacagtcccactagtttgatgggtatattaaaatttcaagatatttgcattaaaatgcctcattctgacaagtggctgttcattttaatttgaaatgaaaagtatctgaaagatgttttctcagatttcaaaattctaagtttgagtttttggtatgatattaaggacaaaacccagcaaattgtttttaaagtatgaaataacaaatgttggattaataaaagttccatgtactctttgcacttttaacagaaaagaacctgaagatgaagctatgatagacaagtgactgtaaacagctgttttattctttgcataacattgtgagcatattgacacatgtggcctctaacctacagccacattgaaaactaagattactgaaggaattcacagaagcaaccaggccagttataaatgcagcagtgacaacaaatatttcttcatttgaaagaatgccgttatttcctcaggagttatgctcaggagacttgaacaacataagtaaccggttacaagatgactggctataagcctctgtcattatttagatagacacacatttgttcgggctgacaagagttgaagatagtagttctgcttcttttatctccatgactgggcaggagccatgtttgatcaatgaagctcacagtggcaggaatgaaatttgtaaggtaaacaggggtgggggagaaccctgaatttacctgcatgttgtgactctgtagactcacctcttttattaaagatgccatgtaaagagcagtcagaggagtttgctctgctggtttgacaattacggtgttcccacagccaagggcggggcctatcttccaaatgaacatgagcaatgggaaattccactagaaagcaaaattgaacaatgttatattgtctctagccacagtttctaaaacgacctgtcttgatagaaaactgataagtttggtgtaattacctggcatatctcacttaggtttactaaaagcaactagtaaatgataaatgttctgaactaaacatagaaggggataggaaaacacccctgaatctaatcaagtcctattattttgaattcttattctacatggaaatcattattttatgcttttgtagataattaagcatggcaaatgttacagatagtttaaaatttataatattctctccttacatctccctaaagaacacttattgaatttacctaattatgatatctcttagtacattgaatgttgaggagacttcatttttactttttggatcccagagactgaaatcaggccatggacatattgaatgcaatttccatatgacagagctatgttcagtcacactagccaagagtcactgtcattctgaaaacttcagaacacttcactgtttctaatttatcttctaaactatatcagctgtatgtgaccagtgccctgtgttaaccttagaggaaatttggttacatccagaacattatttttttggcagaagaattttgagtccccaatcctgcttcctaaatatataacacaggccataaactattccagttttcatggagcttattcctcccactcagtcaaagacattttccagcacttgaacaatcttgcttcagttactattgtccatagtgggaagtctcaaggagaagacagacatgctgggttagtgagcactgctgtgtccactgacatgtcccagcacagatgagttgtgataagcctttgtcacatacttacaaagcacaactcatgaaaaccagaacataacacaaatcccaaaacaacccatgcagtaaacacttaggggttatttggcaacactaaaataccctcaaaggtatagcagtagatagaggggatctgcaccagctaactcatatccaagaaacaaagtgacaggaatatattcttcgggcagtcatacttattgaatttacttcatacataaccatcacacaagcttcacttgtgtggggatggcttcagatcaaatggattactgttttcttttccccattggagtcacgaaggagaacttacagggatgatttggccacacaccccaattggttcacgtcttgtgtaagtaaaactatctccatctggaaaacagagtaaagacaccatccattaaatgcaaatgtgggatgcattcatggcagggtgatagtatggtggtatgagaggagcaccacagtgaatataaaaagggaaacaaaatatcatatctacaagattaataacataaacaatgggacaatcaaatagctatttgaatctaaagaccgagaaacactcaatttcttgtattccaagatggctgccttctacatgcacaaaggacctgggaggtgaggtcctatttgggtaagggcagagccacaaacaaatgtttccagcattttgaatctcccaggggcactaacttttaaaggtaaatgatttaaaatagcaaactatctccccatagtaagcagtctttctactaacttgaaatatttggttttattttttgactatcaaacgtaaatgcaatgtcttttaatgtatgaaaaaaaaagtgtctgaagtgaaacatggttctcttccatctgggtttggcctactacagtgccttactttgatgtggttaccctgggaataatcttgttctgtgttttatattggcttctttacaggtgcctcagctaccacagcaagtactgttcctggcaagaactatgggtgtgttaagcagcttcttttatgtttcctaagaatggtgtaagagccataaaaagccccattcatggtatctctgttgtctcattcttatcgtcttacttcctgaagaccagtgagattggaaatgggtattagtgtcagaactggaagtggactgcttgagttcctgaagtcattccgttatagattcttttccagttgattcttttccacttgaaatatttttcaagtgtctgttctactatctgcacactgagtaatacttgcacaaatacttccatgcaaagcttttaactcagtttgtaaatatgttcttatttgttttgtgtgttttgaaacatgttaatataaattagtttgttttaaatacaccgagcttaaaagggcacagacagcataccttcctctttctggaccaaatgtcttaaacaattgtattacaggaagaatgtcaatgttgttatggacatgaaacacaaataagtgattttagtggccagttttaaaaagtttgagcatttggacactgatacctaattgagtctatgaaaacgctttaatgctgtctacactctccatagttttattttcctcatgattaatgggtacaacctaaaaaaaatgttgactcaatagaacttcctttttcagaaatgtctttaatcaaagtcaatggaaaaaatagtttttgccttattgtttgacatctttatcagcgttttaaggtgccatctctgtaatggtagccggtagccttgtccctgccagttttctaagtacacttaccgcttggtattgtttgaccatggaccttgtctgcccagcctgcacagtacttcaatgctttgatgcaggctgctatatcaaacaggtatgaactggcaaagactttcccaccattgattgcctccaatgtctgaaaaacgaatacaagccacagtctacaattgcaacaagaacattagattaagaacattgttcagcagaactggagagatggctcagtggttaagactgtcaattgctgttccagaagatccagttcgatcccagcacccacatcttacaatagcttacaatcatctataatcccagtgacttgtgatattatgcctccttctgccctctgagtgcagcaatcctgtacttagtgcacagacacacataagggacaaatacccatacagagaaaataatataaattaaaaatgaacaaccgtatactcatgtatgaataagcagcataatctgattcagaagagtaaaaagaggatataaaatgtaggtagtaggtggcatgggtggccctaagcggagttgataggaagtagttgtggatggatatgattaatatctattttataaatgtatggaatattataaataataagaatatatggtggacattttcagtagttatgtcaaagagctttgtaattatatggaatctcaaatcatctcaactaaactgttttttactctcacagcctagacacatgggggaggacctaggccctgccccaaatgatgatgccccatggaaggcctctccctttctatagaccaaaagagggatgaggtgggggtaggtgcggagcatgggaggatgggagggagagggaactgggattgatatatagaataagattgtttataatttaaataaaaattaaaacagagtccaataacttgtttatggtcaccaagcaagctcctgatagaggggataatgagattcctatcatctgacccttgtgctctttctgtcacactctgagttccttccaactaaactatgtctacacactaggcacagtttcacaggtacacaactgtgaaaataacagtctccttgccatataagaattccaataggatctcacttgccatccaacggtagagacaagttggtgtttgcatccattcttgatgcctaagtaattattgtcatattcttcacagatagaaagtctgttggtccaaatgtgacacttaatctttcaccatggatttatggattttcctcaacacttttcaatggcaatcctgccatttaggcaacatactcataactatttcaatagtcaaactataaagttctaggctttctgggatagtagtgttttctctttcatttcttttcattcagactataaaggtctccttggaattctacattccatgagatgatcattcaatagccaaagctcttcttcctcagattcatattgtccactcccctcagaatctacacccatgtgattttgggtatctcttcttcattctcttcaccctttcaaggtaacagaggcagctaacactttgcatgccaccaacaaatgagagaagccacattttggaaaatagcttcctttatatagacaactgagggcagtgtgactattcttttcatattttgaaaaattcagcatcattgaagaatgggttagttttacaaaactttggtaatgcttccagtaaaatgaagataattaaacatagtctgaaatctaagtggaagccatgctattttcagttggctttactaaaatgcatgacccaaaggacaagtaaatgtgctcccattcatattttataacaacatatctaccacagaaatgaaaaaaacatagcacccaaaagagaagtctgattgtattcattattcaacctggattctaatttgttaattcctttaaacctgtcaaaatgaaaattacttctctttgttacaacattgtcaacagacatgtggcaagagaaagatgcattgtaaaaatgtttgggtggatataaataaaatttttctagagcaatattttggcacttttagcaaattcataaatttccccataaaatatttcaggatcaatgaatatgagaaatcaagggcattgttaggggaacatttgaccatagcaaggactctgaaaaattctagagaaaaggtcgatgtgctctcttagccaaaccagctggctaactggagcagtatgtgctcttgggaactctcctatgcatcctgttgttggcattggttaatactcacagccagcagcagatggtctctttctattaagtcagccagcttgaacagtaggcgccctctttctgaagcatccatagtgcgccatggggagccaatctgaaaagcctgccttgcagccttcacggctttgtcaacatctgcctagaaatcacagaacacacagttcaggatattcaaaatactagatgagcaaaacaacatcataaccttgtaaactagaacataatcctcacaaatagaagctagatcttcattaaaccaaagtccagattattctacactctacataccatagtatgctggaatggttactcttgagtaatatttgtaataagctccaatagtctatcaaatagttaaactcctacaatagagatgatttttttgttgttattgtttttcaagatagggtttctctgtggatttggaggctgtcctggaactagatcttgtagaccaggctggtctcaaactcacagagatccgctggcatctgcctcctgagtgctgggattaaaggcatatgccaccactgcctgactcataaattaatattttaaatgtaattaattttcagttttgtctgcaagactggtattgtatggaacttcataaatcctataggctagtggattgcatctttatttaggagagtgaattcttttgagaattagaatatcaggaaggagattccctcctatagttttaagttgcttatatttagctgaagctcagttttgccttcactttagagaggcatggaatgccatattaatatcacctacctcagaaagtgttccataaggtattggagacttacatgtctgcaaactgaaatggtaataaaccatgtcatggtacagatgctcctgcatttatgagaggtacagactgaaatttccatatgataaattcatgaagtgcacatgacacatcacagcttaatttaaacttcctaatatagacagtcttccttaacaagcattgaatatattttgtgtatgctgtggattacagaattgatggcctacccacagggctgtgagactgttggggagtcccacaggcatcctattgaatgtatattgttttattatgcctggcccacagagctagttccaggacagccagggctaccagagaaaccccgtatcaagaaacaaaaacaagaaaacaaaacaaaaaaaaaacctaaaagatttacaaagtttgtaaaatatcagccgaacttatataaatcaaagaccccctgtatttttgagtggggcaggaagaatctttttagaattatatcttggttttaacaatttgatgtttaaagttacccactaatatcctttcactgtactatttacacactagtgtcaaattttttgaagagtaatgagtatgtggaattaaatatatatatagttatttctttgttgcattgagaacaatgtatattttaggtatcatgttgacaatatcattgcttatatttggacttcgtttggttttacaacatgttttctaagtttttcctaaggaaatccagagagcagtgtttggagaagaagaaaaagcaaccctcaaaaatctgagttttctgttgtgatcattagatactttaaaacacactcaggtacacacacacacccctcagtgttagatagacccatgagaagcagctgttgtgtggattcttctgctttgtgttatgtcactggcctttgccaagtatgagctgtcttgagcctcctcccacaacctaagagcagatagaaaatggttttgaaacaaaccttgatatttgagaaaacttcctactcaaagacggcatgacgagccgggtgttggtggcacacgcctttaatcccagcacttgggaggcagaggcaaatgtatctcaatgagtttgagtccattctggtctccagagctagtgccaggataggctccaaagctacacatagaaatcatgtcttgggggaaaaaaaatgggatggactgctgcctgacaaagttccagtatttcagcattgcagatcacgcttttccagcacctttttactttcatttttaatggttctaattactaatgtctttccctttggggaaattttgtatggactttgttaaaggatgaaaatgtgtacaatggtagcttcactaaacaaaagaattctttggggaaaaatctctgccactgtggaaccaggaattccagtgtgtcctcctatttataccaagaacagcaatgttggagatttcctacacacacctgatcccaaggatgaaatgcctacagttcagatcccgagcctgaggccattaagggcaagcatttatttaataaacatagagaaatcagaatggtcctgtataatgggagaagagtaagacatcaggaccttcccttttaggaatgttatgagggaaaaaggaccatatagtgagactaagaaattgtaatatagtgtctgctcctcataaatccttttctcaggtcagacatttggataagagtctccatttactggagtgcttgaggaaagtccctgcttgataaagcagtcattcttatccctagctagaggaatttgtggcctttccattaacttgtgactgttgcctattgtcaaggtcaatgctagattcctcaatccctgatctcaggccacaccccagatcacttgtcctttgtctcccgttaaatcctttgtgcaactgtacagtataaaaggtatgatcttttctcaattagatgttgctggcagtcaacctgactcaccctcacactgtgtccatttcctccttctccacactacccccatgctgactacacacatccttgttgccacctgaaccctgcctgccaaagcaggtctctggcattgagctatcataaataaatttgttcttatgtttatatcttttggggccatgactctccttctctcacattatgtatagaaacctgcaggaccagaaaaagagtaaggaccatgaatttttagtgaaaccaaagcccagctttgaattctgatttttttcttttaaccaggtaagatttcagggatgcaaacatctgtgtgcctttatagcattctaactgtaggtaggctaatgataggacactgaggtcaagagtttgttctgaaacaattgctaaactagaggaacacacaacaaaataccactttattatattgcaaatacagcccttcccacagtatccaaaaagaactgattcccaagttctggaaagataattaaaaatcatatatgctgaatttacataaaatttgcatataacccacagaccttttaggttaactctagtttacttccgatacataaaacaatagtaggtaaatattatagtatagtattattctctattatttagagaataatgacttaaaaagcctgtgaactcaatgtccacacagctgtgatacactgtatcatgttgtctatgtcagcagctccaccttctcgtcccaggggcatttaatttaccaacatggaacttggggtacaaatggtccactctgtcctaaagtaagatacattgtttgaagttcactcctcttattcaggaacagttgtctcacattttctatgtgacagaaaactaagtgttcactagatagagacaactgtggtcctaaaagagagaccagcatgaaagtaatgacagtatcctagtatattctagcatgttctttaagctttctctgccctcttctacataggctctgttgttgtcagcagcctcccactttccttcctactgtttctataaggctcccagtctaatatccttcatgtaattaatcttatcacgttcccactcatgttacacttgcttgcttcatccccaatcctaagggcaaggctttctgattggtttcaaggtccaacatttcctggctaaggaagactttctctttacctttcacctgcttggcatgaaccatctcttctcaccttggctcctgaaattctccttgaatacagaatgttgtagcagcatgatcttttactttcaaagtcccacacattttcaaaaagtcatggatcagtgtgttaacataccacaatagtcacagacacatcgttcaaggacacttagtaattaacagcctattactgatctccaggaaggaaagcaagttgccagaagttattactatagatagttatcatgaacttttctacttttgatagcaaggcaatggaaacaacttaaatattcatcaatagataaatggaaatgtggttcacatagaaaaataaaatactatttagccgtaaagaaaaatgaaatcaagaaatctacaggaaaaaaatggactcaatatgtataatattaagcaaggtcactcaagctcagaaaaagaatcgaatgttcttcctcctgtgaagatcctaaactataatgtttatatgtggacagttgagtgtgtatagcataactcgtataaaggtgatgaagaaagagttgtagcagtaaatgaggcagcagagaacacaggcaaaaggacacttggattgtgagagaggttaaaagctcactctttttctttgtttcaactctgtcatcgtcttttgtgctgggtaagttcacaaaaacatagttggtagtgaaagagtggaacacctagtgaagttctgtgccttcacaatggtccttctaactgtgaagaagctcagggagaggcacagtgagtttggactaggcacgtttctgttagagcagctttcttcctcaggttgtgtgatggttttctttgtgagttcatttcaataaagtgatttaagagagaggctttaagctcccagcacaaggccatatctttatagttccgaagttactagcataattatcatggaccttgttttgtaggtaattagactttacacatgtgacccacagcagaaagtagagccaaaatttgatcttatatatgacctttgtaattcttgtaggtcagccaggttgtctaacaaagctgctttgggtagcatagtcactgctcaatgtattacagaatacaaggtttcttgctattcttttaatacgcacccaatatctaatcattttttaggtttattataaatctaacatgatatgctactatcatacaaaggcatgcattttgccttatgtaacttatttttagatatttctataataatcatagtttaactgacttcattacataacaaaacttttgcattacccaatatattaattacataaagggttttcaatacatttcacttcaaagctctcttttatatttttatttaaggactgacatttccaagatatatgtgttttaaatatatatatcttaaattagacaacaaattagctgagattttctatgatcaaaccctgtggcctagagaaagtaaaatattccagttttgaagtcagagcctgcaggctgaatgtatgtaggcactttgaacgaacctgagacaacaagagccactaagactagttgcagggggggggtgtccgaatcttccatctctcctggaatgtataccctcacattaagttcattcgtagatggagaaaacagcaatcagaccagtttcctttcacacctgtctgaagcatttactttaatggacatttagttttatccctctaattatcgattagctcacgccccaggattagtcagcaggtcctaaaggagccagtgaagtgaaaagaaaacactccccacccacaggcattgtttgctttttaacatgcattttctctggctcatgtaccacacttgtgataccatgaaaggcagggtagggccggctggcagccccattctgtttgtgaatggaatcttcaaaacgtttagcctttgacctaaggaatcagtccaccatatccggtttcctgtgactgtgaactttaccaggttatgctagagtaactaagcaatgctagtcactcttcattagattcctcacaaactgtttgaacagaaataatgatgaaaagacaatttttaaagaatttttttttttaaaaaaaaaaaagaggaaacggagacaggaatgcggttttgaagcaagcccttgtttatcacaaatagtttgtatcactgacaattgccttagaggactcttttgtccaaccaggttggcacagtgtcttgacttgcagcttgcctgggtatgaatcagtttccttgatttttctatgggagggccagttgtcactaagcacagagaagatcagtgctccctggcaaggctgctgggctggacaccagctttgccttctgtgcctgaggaagaaggaaaacctcactgattcccccagcaaagtcctcagcctgcctgacaaggtttccactgaacccaggcagagtttatcttcctaatgggatcaatcccagtgtcagaacaagatgtcacctaggagctaaatactcaaggtttcagagttaaagcagcaacaatattacttcttaataactgtcatttatagattcatagtctcaagtgtcatttttatctacacagagaaggcaaaagcaatgaatgagctcttagtttgtgtatacctatcttaccacattcgaggctttttttttccttcccagtcttgttggagatactcaatgagtgatggtggcatttgaggtaaagccatactgtgtatatcttagccccaggaaaaaagcatttattcttccttgacttaatgtagtaaacatattttcacttccgtctggggttaactcagagacttctgggtttcctgtggcacagccatgaatggtaattatctctctgcctaagttttgctttctagaagttcatgaagatgcaaccatagataagacaatggtgccaaacatcctatctttagcccaaacccatatttcccattatgccctgcagccatgtccataaacgtatcacagtgtacactggagaagaaccaactctttcttatggagatgctggaaaattacatgaagaagagctactacagagtctcctctttcatgataaatagaaattaactcaaatggatggatgacctaaaggaaaaacacagaatgatgatattactgaaggaaaaggggcaaaatgatttcaagatattgggtgactgtttggagtagttgccaaagcacagctgttaaaacaaatatacaaataaattaataaattaatctgtgtagtgttgagtcatagttttacagaagaaatggatgaaacaggcagcttgtaggaggaaagcttagactgctcatctgacaaatattttgttgtcagatgttataagggactaatatcaataaatattttctaaataatctaatttaagtggaaattatgtcagaaaggattgcttctgataagttaatggacatcaagaacatggaactatgtccacttggcagctattggacaaactctacacgaaatgtaattgactgaaattctcttactctattcccaatgattcttaacaaaaatcaaaacataaaaaatagtgttgggactatggaaaaaagaaacccttgcctactctagtgggaatatgattttgccattatgcagtacagtatgaaaatccctgatcttcatatttgttcccataccaattattttcaataaaaaaacttgatagtatatggttcaatctttagcttcacttagcaaatataaaagaacagatgtaagtttataaaagatttctctcttctagcctaagaggtatttcttcctatgagcctgtctatgtaataaacctagacactctttcaattgaaaagcagtcaaggaataatagattgaaaaaaatcagcacctcacctaaggcatccattgatggtgtttgtcttatgccaaggacaacagaacattgacccagctaccagagcaaccatgatttcgtgtctctcattgcacttccactgggttttgagctcagaacagtgagaagcaaagactcctggtataaattggacttgtgcgtgttggaacttaccttgtccccttcttccacatggcagatgacctcctcagttgcagggttaatgacaggaaatttcttgccactcactgagtcatgccattcattgtttatgaagatctgtggagatacagagaaagcaggtaaacacacttaaatgtgcagtaagtttgagcctttttaaactagagatgaagtacaatatgatgcctccatgctgtacgtctctccgtgtctcacaatgcccatcatttgtttcattaacatgtaatatacatacagttaaacatttgtacaaccgagttaaagaaacaaacaaacaaacaaacaacaacaaaaaaacaggtggtttttcattttgacctttggtcccacagtccctgagctcaatccatgcatcccctccacttcatgcttgctcgagtcaccaagtcctcctctgctcctctgctccactttcctttataagtttctcagctagagcccaaaccattttcatgttttacttctaactaagcagcatctcctcataacctgtttactagttgctccacctaaatgtaatttcttttgttccaaattagtgtgttctactatgtcaaagttagacatccacaacctatgagatggtaaaccagcctggacattataatcagccttgaaaattatcatgaaattcactcaccaccaacaattcttatttcatctgtaggaattgcactatacctcagattttctataaataaaccaagaaatcaaatgtctcctaatatgtagatagactcataacctcaccctacccagtttgaaaattggaatttcacttatagagggaaagtcccatactaaactgactccatgttgttatgctattgtgagacttgctagtgctcgcttaagtcctcagatctgtgggttctgagtgatatccctgccatagatgacttctttcttttggtgagctatggcaaagtgtacacatcattttaatattagaatcatgtgcctaaatgtacactgtcccttcatactaaaggcagtagatgattcagaataatactgaagcttatctggtaggctttagataggtgaagaggtaagcttgaataaccctgtgagtgcccatgacccagcattatacagatttaacctttaataccaaagaaaactaggaatccagtgtttctgtagtttaatttatgtaaccatatcctgaatggatgctttaatttttttattgagttgttgcctttgccaacttcatgaaagtacaaagtgcactttgattagtgtaaccgaatgcttctctcatctttcaacacttccaatagtcctcccaacctctcatttgtttacttgtttgaaatctgaatttaacaagaattatttcagtgcccatggatttaaaactatccaaaaggagcacgatgggctcaccattggatatacaagtgaaaatgatgactgtcccatcccagaatccatcagttgtcaatatgtcaatagttcaccaggaaggcacagggacaagtaaacccctccctgatccatgactgctcatagccccagtctcatgttgttccattgtagacagccataggtgtgtttggatcatgacaacactgtctatgccatgcaaaactgatcacaggtgtgatcagaaaaatgttttgtcaaataatgaccatggaggatactgtgaaaaaatgagaaatatattaagtgtagctttgctcctgaaggttcatactctaggaagagtagatttctaatcaatatcaaccagtaaactgatgattctaagagccaaagtagcaattctttcaataaatttcatggcaagacttatgggagaaagggatgtgggattaggtgaaagaagacaaatgatgagcaaagcatgaaccaatcttgagatacttacaacccagcagagacaccactagaataaagttgaaatgaagtcaacaattagtggactctgatgaccttgaatcactagattctagaccaaaaagaatgctttaagaattaatcaaaataaccaaaactgatattaactggagcaaccagatctacaggattctcccagagaccttgtcagcaagccaacaatgaggtcacaaggctagaaagcaaatagctgtatcatccacacagaaggactcaataatctgcaagtgatgaatcacatttattctacacaagacttttcagtactaagacagaactcaacacagtctatatgattaccgatgtatccctaaaggctcaggcttgcaacaacttttccttcctcttacttattagttaaagtgaatttattggtattttctccctctccccgacctcctcttagttgtcttagacttacatttttattggcttctagctacttgtaagaacaaatatatttgaataaccaccctccctataattttattaattagatatatggataaatttagtttaatgaatgtttattatagtaattattaaactcatctgagactactgaatgttctatcatggagagaagtatactttccaaattgttgtttgctgttgacaagtttgggggacagggatgatactatagaataaaatattttgtgcatttaatcattaactgtattataattatgaatgcactcatagtgctttagagtattgcatatgtacaagagaaattaagtctaagttcacagaaaacaattttgaacatgtcagttgcaatcctggaatttcaagggttttttattttattatatttttaaactgatgaaacaatcaataataattttttaggtaactaaaacttgacttctaccttttgtacttttcatagatgaaattaaaaatgatgtgcatactaccttcctatttaccggatgcagaatggtttctcaactcataattgttaggaaaaatgatgcctattcagagtcaaagttattaagtcttcatgttatcagtgaaaaacaattctaactaagaaatctttacactctggcatatcttcagatcatataaacctttctccttttgccaaatatgaaatttcttctaaatatttctgatttacatcaaaatgaattttattaatggacatagtaagtatattctcttcttctcttcatacctgttgatatgagatttggtggcctattggctctcaactccctgcaataaagtgccctgaattcaaatgatttctacacattggcaacagggcaattagctcaggtccttgtaatggaagtcaatgttttcttagttgctgtgaatctataaaaatcaaattttcaatgtacaaagaattataagattttctaaggaagagaaacgctacagtcaatcctcactctagatcacctgtgtatcttgccaaatatgaaaggcagggacacagcatggagagtgatgaggtgtgatatcaacgtgtagggaatggtaaatattattatgtgtacatttttttcatcgttagaaacctgaaaacataccaagactatgagaaatggtgaaaataagatgatgaaaagcacgatacaatgaacaatatgagaatggaacatgttaagtggaccttttttttaaaaaaaaaaaaagaggctagatttctcacaactagttctaacttaagccagaggcagcaaagcaaaatcttgtgattcaaacttgagatgggaaaataccatatggcaggaaactatctacagtcaagtgggtggaaacaaagtgagagtaaccaacacaaatggggagaaatgcagacttcctactagatagttcataaactctagacttcatttcatgtaccccatcaaaaaggaactaaactagagaatagttctagatgtatcaataagtttggtttgagcagaaatactcttgagattaagattatgcaattgtttgactatagctgaaattctctttttattacttgcataataatttcctccctcaaccccaaacatcaacctgctttagacaataataaggaaaaaaaagtcagtagggaaaacaatacataaattgagacactggtcagaaaaggtaatttgataaatacctctaatctgacttttatgctttgcaaccaggagctaaaatccattgtctcaaccctttctcgggagtgggaatctaatacaaatcttcagtggaacatggtaagcagaacatgcacaggtatagagaaagctccccattgagatttaattgcatacataactggtgtcctcccaagtgtgaaaatgctgtaaccagcacatcaaactgtataatgcttactgagtaggccagatttatatagaaaatacacggaagtatcaaaattgactgagtggtgttgcatgttattaactagagaagcaagtgaatacccagcaaacatgtttttgattcttaaattcttaggtccattccttttccctcagatgtccatgtgtttgcagtgaagaggttttagtctggaaacagctgtgttaacatcctgtccttgtatttgggactttaaggaataccccattattctagtactttcatttgcatgctttcctaacaagtcctaaataaacgtaacacagtgggaaaatagttgacttaaaacacttcctatacacacacacaaaaaaaaaaacacagcaaagttaataggacaaataaagtaaagaatgaatagggaaacatctcaactatcaaaatccattctcagctgggatcatgcaaactaaactcttcatagtgattaaactataatgatataaacagagtcaataattccaatctttttgaaacattaggtgtacagaatttcttccaaacaccagaaagtgagtgagagagggagatagaccattgtgagtgaggggttggagcttgtggactcaccagagtttgcatctaccaatttgcaaaaaataaataaataggaagaaagaaagaaagaaagaaagaaagagagagagagagagagagagagagagagagagagagagagagagagagaaagacagacagacagacagaataacctaaattgaaagtcacttactttcttttaaaagtttgtgaaatcaggcttagtgcattgttagctgctcgtcagccattaccaaggttcactcctctctgcaaactttgtgcgaagagcacatgtaacaccacacttgatgtgcttaggaaagtgcaaaaggcttcagtgtttcaaagccacccaaattcatgcaaaaggagataaatgcacaaagggcttgggcccttgtcatctcttttaatcctcttggtttccactgtctatgtcagaagtcaacatggctctgaacagttcatctctttatgctttgaatcataccacatagctaattttcagtggcttatcgtgtgtgtgtgtgtgtgtgtgtgtgtgtgtgtgtgtgtgtgtgtgtgtgtgtgtgatttatttcttaatctgggaacccgaaacaaaagtggacataaaactatgtggtaggaaaaatgcagagtttctcaggacagccacagcctgaacattttctaactctccctcttgtttctctaaatatttatcagctaacaatcacatgtgttctccaatcggcttcaacaataacaaacttccctggagacatagataagcacagtttctatgtcaaaataagcaaataatgcaactccatttaggggttttggcaacagctttcattcgttgctcagacttagtcctccaactccaacactgtgttatgaaacatatggtcatgttatcctgttttagtgtgctatttctcctttggaaagaaagggagatggaagaaaggaaggaaggagggagggaggaaaggagggaaaaagctattttcatatgctggactccttccagtaagttcctctgtttgtctgcctttccctaagtgctcaagtacacaggcttaagagacctgctgctcactctgcttcactgcactctggcacaaaacctttcatacagagtaaaattcttttcccttgaacacatttcaagatagaaaacttaggagaagttgtctagtatggtttacgattcaccgctgaatcagcccactaactttgcaagcattttatttttatgcttgcagaaagcttttacagaagccaaaatcgacataggctttaatcaggcctccagggagagccctgcttgcaagtgtcttaccttggtatattgaatctccaagttatccagcggggcagggacttccggttgagaaggggatgacattgctgttttaagctcctggaacacagatgacaggctcagcaatttggttctggaagagcccttgctcctttttatctgcatgcactaagggtcatttgcatattggaatatgattggatgggcatactcaaggcagggcagaaaggatactactgtcttctaagaccttgggctgggagcctttgcctttaaatgtaaatccttaaggaaactgctcctcagctctgaagttccatctggatactgctcactatttacagaagaattagtttacaaagccaaacctgtggctgagggtgtgtgtgtacagctgaagccagttatttgtttatttttttcttgcctgttcatgctttgttatactatgtaacccttccttctctaatagactgggaatccaggattttacaaggaggaagagtctaaaacatcctctgttctcaccaggatctggggagcagaggaccatgaatcttcaggacatggctacgaacaaatccattctatttgttcgtagatcagggtgctgttagggagaaacactcccttttctagactcttgtcttccacagtttaaaaaacacagccatctcatgtgatctcagaatcctcaaattggctatgtcttttggttgggaacagaaaactgtggttcctgtcactcacagaccctcagaacatcatgtccatgtcatctatgaaaattcatttcaagaggaagaatgtctgatttgggaaacttctatgcttataaatcatcactctaaactgtggccggaaaagaaagtaagtatctctccctaagagtttaaactctgaatgtttcgagcctggaactttgtaagggacaattttgaccttgggagttttagtttggaacacaatgcttctctgtgttgatgctgcagcacacgatatggaaggaagaaggtaacattccttggatgccccagttactaagaattagcaataacttctttgtagtaaagttgccatctcccctgccctgcatggggattgcacgagcggcaggaacaggagtttgggaacctgtttctctttccaccctgaccccagcttctcattttgtaaacacagaaaggaacacagcttgtaatcatagacctcacagtataaggctgaaatctcactcaaggcaaagcttcctcagttattcctgttatacttctttccagctctgccttgatatccgtaagatgatccccacataagatcaaggtgacagtgggatctccgcagaggtagttacatacactgaaattatctctaaacttttattcatcctagcagggataggcaaaatttttctcatggaacagagaggacatactttcatcttcctgggacataatagtctgtttcaatgtgttctatgcttattaaaaagaccaacagacaataggcaaataaatgcactttaaaaaaatggaattgtgtatgtaaaaataggaggcaagccagatgcacaagactgagcatttccctagagtcagtagtctttggatagcctgctcatcttgtttgaatctggatcggaacttctgtgttctttaaatattattcatatatcatctgtctctcccctgtctcatttcttcctctccttccttcctctctcctctctctcttctctcctccctctcctctcttgtctccctccacctctctccattctctccctctgtcttctctcccctttcctctctcttctctatactaccctctcttctctctctctccctctgtcttcactcctccttctcctctctctccctctcccctctctcctctctcttctttttcccttctctccccctctctcttcctcccctttctcctctttccctctccctttctctcctctctctaccctctctcttctctctctcctctctccctctctcaccaccctctctttctcttcctctctcactctccttctctccctccctccttccttccccctttctccttatttttttttgaaaaactgaactgttttctctttcattaatgtttctggatttaaatgcacaattgctcattagctgttatataacgcacagaatgctgctgaggccattgcccaaacaactgtgttttgcagagtcacagttgtttgtagcttcaaaactggttcacttggtgtctagaagggaaaaagcacaggctgcacaacatacttgacataccattcactttactctctgaatgggcaacatcattcattgtattttcttggataattacataataacatgctcttcaaatccaccattgtgtgtgtaactaaaggacactttggagacagttaccatacctgcccatttagcttcccaagtatttattaaacagcttatatgcaccagccattcttcagtcttcaaaaaacatcagctgagcttgtcttttttctcctggaaaccacaagtctgatagatgtattttggaagtttaatatttagaaaagcttattcctcagaatagataagcaagtaaaagaactttttctcccccctctttcccttacaggacaaaaactagctttgttatgatgatgagcaccaagtaggcctacttcttgactggagtcacagttgggtattttcaacatatcccagagctagcaatttaacatgggttcctcaatagagaatatttccttctctatgacaagctaaattgctctattgtatccacgtacacaaagccagggagagtaaaaaagaaattgagatagtaacgtgattgcctcctgctctttgcatggcttttttttttgggggggggggcaggggattggttttagattcacatttaaactaaaattatgtgcaagtgtgggagggagggaggtatgtgtacatgaacacaggaacctgttggagatcagaaaagagtgagagatctctcagtgctggagattcaggtggttgtgagttgcctgacatgggagctaggagtagagatcatgtgctttgtaagaggagtgtgcattggtagcaaatgagccatctctcaagcagatgaagtctgttctttccccaagaaatgtataaactgcaacatcttctgtcaccaaaaccaatctcaatagactatacatttgttcttggctccattcaagaaagaaccttctactaatatgaataattcacattaaaatagattaaataacaaaagtgaactgcatggtgaggtgaaaatttccacaatagattgaaagtttgttcccctcaaaatgcacacactggaatcttaacccagtgacaaagtgtgaggaattggtgacttggggataagtggtccatgaaggggaagccatttgtggtgataggaatgatcccagagcctcatgcattctgagtgaggactctatcaataaaatacaacccctgcttctcctgctgacttctttaatgtgaaaatctaaagagaattcaggagtctgctacccagaaagaagttagtgctcatactgcttgacagtgccaaactttgatagaggacttctggcctccagaccttggagaaatatttttgtttgtttgtttacaaggaaattatgtttcagaattttgttgtagtacctaaaaaagtgtaggatgactttttttcccttctcacattgtctaatttcaagatccaggatggttcatgtgagttcagagtcttgctcagatagtttgtgaggctcatgtctcactcctagaaccactgctttcttcccatagtaggtatgccttcacattttggtgaatataattttgtctgatacaatatcattttggttcatattgagtgtttaggtttaagtaattataagaagtagtccttgcttgtgcataattgataagctgatgctaacaagcctgtattaaattaaatgtacttgagggataaattctgttcacttactattctccatttagccatatcccatcacctctgatttcgttggttcctcatgtatcgtaacattgcttttctgcttatttcatacaactaagatatggcctgtatctccagcgtctgatgcaattgggacacttactgcatagtaagttctctaaaattaactgtggattaaagattatataagataattgtgtgatcttaaaaacatttttgctaaaccttatgggccatgctagccaagatccagaagatgatattggcccatgaagttgagcttcccaacagcactcagtattttgtctacactttccaccattgttcctaacagtagagagagaaaataaaaacactggaaacacttgttaggtcttttgtagctttcctgttccatgtgtcccacatttgtgttatggatagattacccttcaatgttgggagccaaatctcagggcttggcatgagatcctaggccaagcttggcaggccacatagatttaacctttacatagcagctccttagaacctcagctcaagaaaagaaataacttgacccagtcctccacccacaggctcagtcacctaggcaacccttcctggacctcttactcatgaactctttaccctgctaaacatcctctttgtggcttcctaatatcctgcctacactaacacctggctcacaaacaacccaatctacccgtctccacatcttgctctgccacctatataagctagcctgagaaaaaagtaaagtttgccacttgatcagaatcttgtcttgtggtcgttctttctgtgtctgttgtccccattccctatccctgagtctcttgccccaggttgatgtcctgcaggtcggaacaactagcgcccaacgtgcagctggattgagttggggatctgggaacttcagtgcccattagaaggacgggcacgtccatgcagtgaggtgtccacaacaaggtcgattgtgagcctcggttggaggaatacccagcagcctgcccagcgcttgggactttcagttcatgagcaccacctacgtggaaaaggtgagtaatgggacaagcattttgcaaggaagatctattttttttctgggatcacagaatccctcaaggctcaaggaactcaggttaaaaacaaacaaaagggttcttcctctttgtgggggtctttgtccatggttcccccaggaaggaaccattgatggggagagatgggctatagttggcaactgcctccaagagttgatcgtcttgacaacatggcagaccagatgggttcatgagacatgaagtgcagcagtacagtgtgggatggggccaggttagggaagggtcactagtgagaagcccatgtcaggttggtttaaaaagtaaaagaaagaaagcttcacacaatcgtcttaatgctattacatttgaaacttccagtgcttctttgtttctgtacctggcttgtggatccatggcgagtttgtccactgttacagggccaatggtggggaagagttcaaacttgtccttgttgattcctggggaatgctgggaagttgcaagtgaggtcatggaattagagaggttaaggttgacagtgatactgagctggctctgaatgcaggaggctaaggaaatgtgaatgtcaggagggattcctagtataagacttttgggcctgaaaaaaaaaatccctgtccaaatcaccactcatggcgtatccacttttgccttttacatgagccagaaatgttttcagtagtttcttttcttccaaaacgaatggtgatgtaaatctaatataatgcttaggaatagagtatacatggatgctgtaagtgagacctggcaaagaattgagctgtgtagctaacacctctagatctgtagttatgcacagaggcctttctgaaagctgtctgaaggttttcctgtcttctcattcttatcacttaaccattcattgaacaagtgcttctttgttttggggtactttgtgggacatttattaagtgctggaatttccacttcagtaattatttctgctgctgcagtttcgggtttctggctctacagcaagtacagtgttttcaatatcattatgttgtaacataacctcaatgtcaggagaagatggctctatgtctgaacacatgctgatggtcctgtgtctctgacactgctgtacaatatgccaatcaacccattcttcacatcccctgaaaatgacctcgatgactccaattcaatgattggcttggctggcttccctcatatgggaaaataacctcctattaccttttgtttccttctacccactcctactacttccctatggttaaccacactcttcccttccctccttggacccctgatagggctcctcttattattttccttctacccttgggcctttaatcaacttgtggcctttatcaagcaacaagtagactctgccactaagcctgtcctggtccaatactaacccacttccccacggccagcttcagaggtgcagacctggatggtactgcaaggagaccttgtcttctgaggaatatgcctgcaaacaatggggtcgatgtcctaaagcttccccacccccacaaaatgcatccggacggtcctgcctttcagatggctcctagaagccatcctcaggatcagagaaaaatgtcctttataaaatctacatagattctccaattggggaccaggcctctatcccctctgcttaaaaatttggccacttctttttgtacaaggaagggggaatatgttgagagccaaatctcagggcttggcatgagatcctaggccacgcttggcaggccacatagttttaacctttacatagcatctccttagaacctcagctcaagaaaagaaacaacttgacccagtcctccacccacaggttcagttacctaggcaaccccttcctggacctcttactcatgaactctttaccctgctaaacatcctctttgtggcttcctaatatcctgcctacactaacacctggctcacaaacaacccaatctacccctccccacatcttgctctgccacctatataagctagcctgagaaaaaagtaaagtttgccacttgatcagaatcttgtcttgtggtcgttctttctgtgtctgttgtccccattccctatccctgactctcttgccccaggttgatgtcctgcaggtcggaacaactagcgcccaacgtgcagctggattgagttggggatctgggaacttcagtgcccattagaaggacgggcacatccatgcagtgaggtgtccacaacaaggtcgattgtgagcctcggttggaggaatacccagcagcctgcccagcgcttgggactttcagttcatgagcaccacctacgtggaaaaggtgagtaatgggacaagcattttgcaaggaagatctatttttttctgggatcacagaatccctcaaggctcaaggaactcaggttaaaaacaaacaaaagggttcttcctctttgtgggggtctttgtccatggttcccccaggaaggaaccattgatggggagagatgggctatagttggcaactgcctccaagagttgatcgtcttgacaacatggcagaccagatgggttcatgagacatgaagtgcagcagtacagtgtgggatggggccaggttagggaagggtcactagtgagaagcccatgtcaggttggtttaaaaagtaaaagaaagaaagcttcacacaatcgtcttaatgctattacatttgaaacttccagtgcttctttgtttctgtacctggcttgtggatccatggcgagtttgtccactgttacagggccaatggtggggaagagttcaaacttgtccttgttgattcctggggaatgctgggaagttgcaagtgaggtcatggaattagagaggttaaggttgacagtgatactgagctggctctgaatgcaggaggctaaggaaatgtggatgtcaggagggattcctagtataagacttttgggcctgaaaaaaaaaatccctgtccaaatcaccactcatggcgtatccacttttgccttttacatgagccagaaatgttttcagtagtttcttttcttccaaaacgaatggtgatgtaaatctaatataatgcttaggaatagagtatacatggatgctgtaagtgagacctggcaaagaattgagctgtgtagctaacacctctagatctgtagttatgcacagaggcctttctgaaagctgtctgaaggttttcctgtcttctcattcttatcacttaaccattcattgaacaagtgcttctttgttttggggtactttgtgggacatttattaagtgctggaatttccacttcagtaattatttctgctgctgcagtttcgggtttctggctctacagcaagtacagtgttttcaatatcattatgttgtaacataacctcaatgtcaggagaagatggctctatgtctgaacacatgctgatggtcctgtgtctctgacactgctgtacaatatgccaatcaacccattcttcacatcccctgaaaatgacctcgatgactccaattcaatgattggcttggctggcttccctcatatgggaaaataacctcctattaccttttgtttccttctacccactcctactacttccctatggttaaccacactcttcccttccctccttggacccctgatagggctcctcttattattttccttctacccttgggcctttaatcaacttgtggcctttatcaagcaacaagtagactctgccactaagcctgtcctggtccaatactaacccacttccccacggccagcttcagaggtgcagacctggatggtactgcaaggagaccttgtcttctgaggaatatgcctgcaaacaatggggtcgatgtcctaaagcttccccacccccacaaaatgcatccggacggtcctgcctttcagatggctcctagaagccatcctcaagatcagagaaaaatgtcctttataaaatctacatagattctccaattggggaccaggcctctatcccctctgcttaaaaatttggccacttctttttgtacaaggaagggggaatatgttgagagccaaatctcagggcttggcatgagatcctaggccacacttggcaggccacatagttttaacctttacatagcatctccttagaacctcagctcaagaaaagaaacaacttgacccagtcctccacccacaggttcagttacctaggcaaccccttcctggacctcttactcatgaactctttaccctgctaaacatcctctttgtggcttcctaatatcctgcctacactaacacctggctcacaaacaacccagtctacccctccccatatcctgctctaccaactatataagctagcctgagaaataagtaaagtttgccacttgatcaaaatcctgtcttgtggttgttctttctgtgtctcttgtccccattccctatccctgactctcttgccccaggttgatgtcctgcaggttgggacacttcaacatgtttatcattttactagaaaaattctccataccaacttttacactcataagcttaaatcacattacttcagtcatttgaatgaagtagtgacagcaagtgttgtcaggcttggtgctgagccctgggaaacagcattgagtcagaactgagattgcaagacatggtaggaatggtggtctttctcctcctttatgattttccagagttatgtacttcttaaacaaagccatttatagagtctttaaaaaccatgaggctacagctcaatacgtagctataaaatgaaaaaagaaaataaccacaatgtgaacaaagaacctgatggggaatgtactgtgtatgtttatcttattgttaaataaaatactgtttggccaatgagtcagcaagtagatgggactaggagtcaaagaggattctgggaaatgtagtagagaagtgctgatccaggcagaagtgacatagcaaggagactcatatttaaacaaaggagaaacaggaaggacccccttttttcccattcgcctcctccagctgcaagatgtgagccaccagcaaggagggacgccaataaggcgtccaataagataagtcttataaaatatatagatgtattttaaatatatatatatatatatatatatatatatatattattgagactgagctaacagatgagaatcctagtgattggccaagcagcattgtacctaatacaagtttctgtgtattcatttaggcctaactcaggcagacggttggtgtaaagctcacacatggcggtggggctcaggcggcttttggcagaaatatttattgtaacaagaaccctcaatgagtgtcacatcttgctgggccctcactaggaatcaccaatccttttctactctctctaagtacctgtactccagcatgaatccaatcattgcatgttgacaaagcaatgtgaatgcagcagtgttcaatgctatgttggagcaaggttttaccactaagcaataatccattctatcagacatttcaaaggtcatacaatcagcttcctacccctccctctcacaaagtgatttctcatcaagatgcctgatcactgaaggattcaccctcagctttgctgtccacaatgccagcaagtgaaatcacctgttgcctatttcttgactctgaaacaaagattgttcaaggaaagctgaaagctgcttagtattgaatgattttaagaggtcaaacaatgattttatgtgcacacagatatggctataggcataaactatccacattacattaaacagaaagtatcctattagctgttatttcatcatttatataagtattacttaactttttcatgctatgacaaaatccctgtcagaatcacctggaggaagaagggcttattttgactccagtttccttcacattcaggaagtagagatgatgaatgctgcttctctgcctctacctcctatatccctgcaccccaaacacccaagtctgggtacccagtccttggaacattgccacccatgttcagggtggttttctcacctcaaatagtctaatttaggaatgttcacacaggcatgccccaagatttgtttgcatgttattttcaaattttcttcgttagacaatcagactaattgatgtattatgtacaatattttaagattttagtgtgggagaacttatattagtacttaatttggtcttcctagatatataattgaatcctgatcatagcaaacacatacttaaccattgtgagggtatgaagtccacagaattcattcactggagatctgaaaagacaggcccatcagctcaaactgtttacaactggaaagatacaataataaacaacttcactcctctattactcagccccgtattttctacctttgcttggtgtgtcccagaaccctagctgctgattcaaattgggatactacctacttgagccagaattttgagctactaatgggttgggaacacatccattgcagtggtattatcaacatatgcaaacagtgtattaagatttaacgtaattatgttggacatattcatgatatctgcatttatgtcattcgttttaaagtgtctttttgtgattgaaacagtatggggcaaagctttaatctgcctcttgaatttttcaaaataactcacttgcaaacctgtggtaggctcagttttatttttatgaatttaaattacttttcactaagattattattactatatcaatatttattgctatgcttgatttaacatgtatatatgggtgtggatataaatgtcttagagttattttgaattaaaattttggcattaatagatagggcttactatctttctactggcattttccttgtacaagcctctttgaaaaaaaaaatctgttttccaaggtcctttgcttacttaggcctgaaatacggacatttaaaagtccattctagaatttgtgactaaagaaaagtgaaaagaaaaataaacatgccattttcaaattaattttttcttgactacttagagggttactgtaggtaccaggtagacagtaaacttggttggcttcattgcaaagcatagtctgcttttcaatatatttgagtcaatagcttacatgtataccttcagttttgaagatgagaccattcaagtagacagtacttttttaattattacttttactacagaagtaaacacatcactccaaagaattaagagcaacagcaggtaagggcagatatgctaggtttcttcttgcttttagttgccttgtggaccaagtgagaaatcaatgatttcttaaaaaggtagcttctctgtgcttattattgcaaacagacttaagttattgatgaatagctaatggaacagatttggaagagaaagcagaaatatttccaggaacatgttctgtttatgttttaaatgtctcagtatgtgtgttctaatatattcattttttttgttaaagaaatgttctctaagttttgtaaagaaaaatgtgacaggaaatatcaaaaaatgataaaaacgagacatataactatagatataagaaatgtgtttgataaagaggcttaaaagagaaaaaaaaattttctggatgagaaaggactttaggttgtattttagttttgttctaaaagtaaatgattgtctgaaaacggaaataacaaagaaggcaaaactataaggttaacatatgtcatatgaagacttgtaaaagttaaacccaaaagaaagatggtgtggctatgactgagttgggtgtaataaaaggttattcaaaattcccaaggccaaaattcaacacactggggtaggactgaagcctaactctgtttacaacaagtttcttaaagcactgatctaatcttagcaatgtttacaaaataacttctttgaagaacaaggatttaatgtctcatctctttaccaaatgggcatttaaaccacagtgattgacttttatccaggtgcagactgtttgattttccaagggttagagctgccagcctatcagcaagcaagtttgtattagaaagaattgtttctacatggggcatttcttaagattatataataatcatgaaacttattttagtagctaaatattaatttattatattgccattgacaatttatatgtataatacatcctgattatgatttcctatcccccaccatcatacccacccaaccccatgccttttctttctctctctctttagaatacaaacaggcaaacaaaaaacctactgctagacatggtgcctgatccgaagtctggtttgtctaccctttgagactccattgtagtaaactaattttcactttgcaggcagatgggaattgacaatagcttcttggtagggataggagctcatgtccagtcatccctctcagctctgaaacccatctggtgtctctgcaggccctgggcatgctgccacagtctctgagcgttcatacatacatcagtcttgtatctagaagacacttttccttgttgctatctatactctctggctcttacaatctttctgcctcctcttccacagaacttcctgaaacctgagggaaggggtttgatgaagagatcccatttaggactgaatgttccaaatatttcttactctctgtgtgttatctaataggtggtctttattttagggcccatccactgcaagagaaaacttctctggtgatgagtgagatatgatctgtaagtatggtaaatatttaaacctgcttctaaaatctgccttttaattctcttgattgatggataaatgatcaaatataatatgcttcttaaaagtaaaaaaatgaataaatatgttcctaagccaaatacaatagcattaattcttctaaatctaagatctcccatttagaaaaaattatgtttatataaaataattactaaatttgaggaaaattgaggagggaactgtatgaacaatctttgttaaagggaaccactacacactttaaaaaataactagccgggcgttggtggtgcacgccttattcccagcacttggcaggcagaggcaggtggatctctgtgagttcaaggccagcctggtctccagagcgagtgccaggataggctccaaagctacacagagaaaccctgtctcgaaaaaccaaaagaaaaaagcaaaaaagaaacgtaaaaattcagaattgattatagaatttttctataatgatctcctgggaaaacacactaacaaacatgtagggagaaaccctgattagagggaccgctgaccaggcccggttagttgtacctctaatcagggtttctccctacacaaacaacctaaccccaacaaaaaaaaatgaataaaaaacaacaaaaagcctttctttccaacaacaaaactaaaggaattagtactaaaaccaggtgtgttgcaattagaaaagaaacttcatcaatgcctttgagcttcagtacaaagaattctacccgatacattaaagatgtttctgggctatgaaacttcactcgataaaccaataagaccatacttctcaccttgagctcacactaacttccaaggtcacatccaaccagactttagaacatcttggtcatacccgtccttggattcatttgagtgcccaaggaacagaactcaaaaccctctgccacaatttctactaattctttctcttttataggaattagaacactatgatattggaatttccaaatcatggaagtaatgatagtctcgatttcagtgaaactacaataaggttattattatatcctctcattatccacatttgtattcggactgctgactcagctaggtcttttactttatctaatgaagtcttcatggttaagaagattcaaatttccaatatcttcataaaatgattctctaattgcttagtatagatttggtaaaaatacactggtttaaattgacaaagacctattttaattcttccaagaggaactccagtggagagagggggtttacttctacttcaagttcaaattcccagtgccaaaagcaataacacttcttcctactgaaaaaatactaactgaaccaaaccaaataaattaatatgttgctgttgattttcagtttataaatatatagcattctgaagcctctgggaagcctatgacaatgacatacttagaccaatgtgtaaccctgactccattgattctttgcatctttaaattccaattatacaaaaacaatcaacctgcgatgacagtatccaggatatttataccttaagagccagtgtttcttggttaaatatgtcttccattatttgcctgttaattactttccttgtgattgttcttctatctactcaactttagatgctagggggaactcttctgaccctgaagtgtgtaagacaacatctggcctccaaatgcacaaaatatggtatgtggtcaagagggagaatagtggactgaagtgcgcagaaaccatgtctacattgaagatgtttcaaggccacccaaatgcctaaacttcataattttagattgttggaatgttgtagatgcagagccaaattatctcctctgactttggtgtttaaataactatttacacccacctctgtgtctgctctaactttcttgtgaatgtcagagaaaatctttcagaatgttttaacttagaagaccagaagcttccaccagcctcaaaactaagaacaccatcattaagaatagcatcaaagatccacaaaagagatttccctgcttgctgactcccatctacccactgctcccaccacttatgattacagttctgtaaatttaatacatgatgatgcaacatgaacctgtcttcctgggccaggagcatgcatatttggctccagagtaatcgcttgtattctgctggaggtgatagatatgtgccatgtcaacacagttatttgctaatatctaaatatttgtgttcaaatacaggtgagctttgtatctgtccttggaacaaaaggctcttcagcagctaggcttctcaaaaatcatgcaggtccagttgcaacataaactcatatttattttattgcagaagcaaaatataacacaggatatttgtgaaagctattagctataaaaacaatttttgtatttatatttgcttacttaaatttgttcccaggtttgaaattttttaggcatatgtagatctgtgaccacaactccaatggccttccaggttgtggttttacatattagctggatattggcttcctaagtactaagtctagtagctgcatttgcaagcttgtgaaatatttatttatttatttatttatgtatttattttgtgctctatataccctctcactctttagagacatttacacaaagaacccagatttttgtgtcagaaaaggctgaaaagtcaattttaggacaatgagatcactgagccaatgaaaaacaacatattctcagcctctaggcttggtttgagctcagatatgaggtttcatctgaagcatcttgcataggtgaacatggggcagctgctcttcgcccatttcctcatggcacagccaacctctgaatgcaaaacagagactctcaagctggtaaccaccttcacatcagctggaaatctttctaacacaaagctgctaagtcagaaactttgaggtgaggccaagtcacctgcaaaatagcaagcgttcctggagaatctagttgagagccactgcaagtccacactgccaagaatttttgttcatctaatctgctttcactatctcactttctcttttactttgtattcccacatccctaaaacaaccttaatttctcaggcttgttttccttagttgcttcttccttgtgatggtcacatcaaagcaactaaacttcagcattcctgaattttttgtttgtttgtttccagtaaaaccatttcctctcaaattcatgatctcttcttataaacaatatttgtctatgcactgctcatatgtatatttaaagcaagtggcaatatagttcagatccctagggagtcagagcaagtttgacgaccagataggagagtactcaagcgacagaggcagtcccttacaaccaggagaaccaagaaacagagcacctcctttgtgcgaccctcatatttaacgtcttgctacatcactgaccaccagcttttgtgcattgtctgcatcacctgtgccaacccccaagagggcgtggctaacctttcccctacatatatttattcagggctgactacttgggattggataactctcagggtgtcttgttgctggagataattggttcttcctctcttagctcttctagccgaggggccttctgaaattttttctattcccgttagcatgttgactagtattgtcattttgcaggtgttgtttaagcaaccatattgttgagactgcactggtgcagcttccctgtaatgtctagaagcagatgccctggtcctctggctctttcaatctttctgactcctattctaggtaaagtgattccattgtagagcagtcaaacggggttgggcaccccatgatctgctgatttcttcattttgacctcttttatatttcttaaacagtttccatatattgcaaaaggaaaaaagaagtttctttgatgaggggtgagagctacactcttctctggggaatattatgtagaatacacttaaaattatgtaggtttaggaaaaggcaagagttctgctcaggttctctgacttctatatccttggttttttggctaggtttacaggaccatgcatgatctctctcattttgaaaggaacttaaatccagttatacagctcttggttagtttcaaaatgaaagtaccggtattgaactatttaggattatctttccatattggttattgttgtagttcataggttctagatatgaatagaactatcggttgatttctcccttggcagtttgcataatactttcagatactgtgagagctagtgttaatttgttccaacttgattcctacaagtcctgtgtctgaagtaagtggtttgtttgaatcaccttgaattattttggaggtatccaagaataagtgcagagtctatattgttttcagactctcttggattcctctgaacaacaactataagcgaggattcctatgcttagtactggggcctttgttatatagtcagttcatagattttgggggaattattatcaccctttgtagaatatatttattacataagtatgtattttacaatataaatatatgtatatatctgcacaaatgtactttatatgtattgctattaagtttataatgtaatattcttccctattatttaaaaaacatcctaggagatagaaggatggtcgaataaatataaattgacaaatgtaataaaccattgaaatagacttaacaaaatcacattatcgtctcattagatggagaagaggcctttggagaaatccaacatacttttatggtaaaagtcctagaaaaaataatactagatgaacatgcctcaacatataacctcaacataagaaaggctatatgtgacaaacccacagtcaaatcatcttaaatggagaaaaaccgaagtaattccacttaaatcaggagtgacatatggctgaccctagtccttgtcaatacagcacttgaagacttaattaaagcaatgagacagtagaaggaaatttcaggaagaccaagaggaaaaaaagaagtcaaattatctctgtttgtggatgatatgagattctacataacacatcccaaaaattctaccagcagacttctagaatttgtcaaaagtactagagaagcagcaggatacaaaatcaatttgcaaaaaacaaaattatcactagcttttctatatacaaattaccaaacattttgtataagtgatcatagatacactccaattcaagagagctgccaaacaaagcaggaacaaacctagtgttttgatgattctccagtgaattccagagtagctgcatcaattgcattctcaccaatagtgaatgggggtttctttcccccatagccttgttagcgtttgttatcagttatttttttgatttttttgatttctgacctagatgagtagaaatgaaatctcaatgtttttaattgcatccccctaattgctaaggaggatgagcactttttgagacctttcttagccactttttttgtcttttgagaactgtgtgcatatccagaaagtcctctgtaatgaagactttaaatctccaaagaaagggactgaggaagtcgttagaagatggaaacaaccccccatgctcacagattggtaggattaatattgtgaatataacaatcttaccacaaacaacttacaaaaccagtgtaatccaaatcaaaatcccataatattcttatcataaaacaaaatgattctaaaattcctatggactcacaaaaagaataattctggagaaattataatagagttcaatatactacaaactactacaacatattagggctatgaaaataagagtagggtggtactgcaacaaatgacatatagagcagaagaacaaaattgaagtcacaaacttgtgtacaaatctatagctgtcttatatttgacaaagattccaaaactacccaccagagcaaagacagtgtcttcaaaaactgatggaaaaactgtggatatccacatacggatgaaagaaactagatctatgtctatcactatgcacaaaacataactccaaatgaatctgatgcatcattgtgaaacataaatcactgaaactgctagaagaaaacagtcgctaccctacgagctattgatgcaggaacatctttcagaataggcctccatttgctcaggaattaaggccaaagccaaaagtggggcatcataaaacttaaaaaccctgtaaaacaaaggaaacaatcaaacaagtaaaaaggaagcccacagcatgggagtctttgccagctatacatatgacagaggcttgatatgttggtatctagaatacataagaaactcaaaaacagttaataaatggtcacagatctctacagagttttcaaaagaaaaaaaataaaaatggcaaagaaataactcagaaagtgttcatttttcttaacaattaagaaaatgcaagtgaaaacattgagattttgtctcattcaggtcagaatgccaaaggtcaataaaacaactgaccacaaatcctggcaaatttgtaggtaaattaggagaagcatcattcactgttggtgagaatgcaaattgttgcagccactctggaattcattagattatccttgcaaaacaattaaatttatcatatgatccagctacgtctcactttggcatatgctcaaagaacttgacatcctactccacagatacttgcttacctctcctcacaatagctaggaaatagaaacaacccaagtgtcctttaactgataaacagaaaccattattttttctagttccaaatgaagtatgcatttcatttcctgacacggggacactcctcaggatccttcttcagtaaagctttaatgcctcttgagaggaagaggataagcttacaaaatggagaccctgaacgcccaaaaacccctccttatataggaccatgtgacgtcagctgatcgaaccatatgacgtcacgggaggggcggagactaagggcaggaaagttacaaagttacccattgcgcatgtgcacagcttccaatggctccttacatatgcaccggctcctaacatatcccccttttttattaattaatgataaggcttcatatttttacaagcaagtaggtcacccatacattgagggatagaggcagaggttgtacttcccaaatcatacaataagactgtgtacgagagtcgcccctaggctgttagcttgacccgagctctcgacctgtcttctgccgtttttctgggaaagggaaactggggcaggcaacccttatgcaggacaacatgcctcccagagaagcctgcatattaggcaactctctgtgcgatgctttgctcgacatccctcatgggctgctcaagccagacactctaccctgtgcaatgagcctaggctccgggtgtgcaagagctgtctgaccggcggcctattgcttaaaaattgttaaccaaattttagtggaagccccttgttccaaggctacaagcacttgggtgatcttagtttgagccctgagcctacagaccagccaaagaagcaacaccaatccgaagcaaacggttgtgccagacattcccacccccacccattctttgaagtaggaaacagctgaggtgacccatgacgacagtccctccgtcagtgacagatcgatagcggctctcaattcacgcagcgtctgctcaaattcaaaggttcaattctgcaatataaactgaaaaaggcttttagacaaattagctgctttggtaaaattctcatattggatggaggtaacacataggccaaggagcttctgctcacagcctctgctcaaattcaaaggtccaattgttattgacacataggccttggtcagctactgagaaacagagacttcccttaagggaaatagtcctattttcacaaagctctgttcatcctcaggcagaaaaggtaagcccagctctttattggtggcaaagagtcagggaaaaacttgtgcattatacatcaccagcatcagaagtgggaacgttgacgtgattctccaacgtggttccccctagggaaccatctgtgtataccactaacctgtcttttactaatattattaaattccaatttttgggtaatgcagaaagcacgggaagacctctttgcactgcaccaagggaagacatttgctcattaatagctcttaaatcatggagcaaacactatttacctgatttctttttgatgacaaaaattggagaattccaaggggaggttctatgtgccccaaagccaattgttccacatctaaagtaagttttttttttccttcagtaagttttttttttgttttttttaattttatttatttattatgtatacaacattctgctttgttgtatacttctgctttgttgtatacattctgctttgttgtctgcttctgcacaccagaagagggcactagatctcataatggatggttgtgagtcaccatgtggttgctgggaattgaactcagaatctctggaagagcagtcagtgctcttaacctctgagccatctctccagcccaagaacaaattcttaacatcaaagcttttaaagacccaaagcccacccccagtgacacacttcctccaccagagccacacctcctattcctcataatcctttcaaacagtttcattccctggtgacttgagcctttgagggccatttttttttccgtctgccctcaaagacaggaaaagccagctttctttttatcttcttatagggagggggtgctttaggagcatcctgcaaaagcgccgtttggagctgccttcttcgaggttttttgttactttgtatatggtcatccaaatagtatctttctttttcacctagctgagctgcttcctcaaaatctaaaacttcatctcctgagctttcagagtcatcagaactattaagatttaaagcttcaaacttatttacagaatcatttaacaaattactcactcccttgtcattagacaccccgggaggtcctttttccttatacgttgcagtttctcttcttacacacactcccatgtcactagacaccccgggaggtcctttttccttatattttattgggcgcgccccacctctcactacgttcgatttctgacatgtaattctggactgcttcaagattgttacaaccgtgagaaaggtcaaaatggctcctagtaaaagcacagaagcctctacactaacctcccaaaatggtaacattcccaagccaaagtccagaaaagacatacctctccgaattgtacctccctgcagttctgaatcctccttgttgccaaggggtctcctatggtgctgatgatgatgaggtcaatttcccgggtttctgcaccagatgtcccgcgctaaccgcctcgccagcaaaaatgacacggggacactcctcaggatccttcttcagtaaagctttaatgcctcttgagaggaagaggataagcttacaaaatggagaccctgaactcccgaaaacccctccttatataggctggcaaccgttgcctcaggagtgttacattctgactggctgaaaccctcggaccatgtgacgtcagctgatgaaccatatgacgtcacgggaggggcggagactaagggcaggaaagttacaaagttacccattgcgcatgtgcacagcttccaatggctccttacatacgcaccggctcctaacacctgatcacattgtctagaatgttaaacactgaataggactgatttgaagccaaattatcatgtttctgatcatagaaaaagtattcagtctttcgctattataatgatgactgatttttttgcgggggtggggagtgttctcatttaattcttatttcattcaggaatgcattataaacatgtccaagagtttacctttcatatagttaggtaagcatatggtgaatcacattaattcaaaatccaactaatcttccatttctagaaagaattacactttgttatagaatataccttaatgtacttaaactgacttgattgctgaaattaaggatttttacatattattaaaatggatttatcccctgccaataactttgtccaggcttgttttgccttttctttcttttttttcttttttcctttcctttcctttcctttctttctttcccttcccttcccttccctttcctttcctctctgttccttcccatttccttccccctccccactttctgttcctatgctcccaatctcttgctttgtgaataagtaactctagcttatcacctatttggaaacattaaacacaaccatccaagtaccattttgtgccctttgctgtcaaaccttggtcttttgaaggattttgtttattcttttacttctttcttattctttcttcattctttttcttacttcgtttcttaaggctaatgagatgtccctaaattggatatctttgatttttatcttccttagtggatacagtgcttcttatatctgagtcctccatctactcctgtagagaaatgttcacagacacaattttcacacactttgtctctgttccttctgacactcctgttttgccttagaatatgtaactgtgttttgttagtcatttatcctttttttcctgctttttgttacttttcactgtatgtttcattatggataaattttttcttcactaatttatcagctctgctttctacagtgttcacatcataataagaaatttattcagtaaagtgtttacaagagatcatttttagttaacaaaatattgctatgaattttaaattcccaggtacattcccaaaatttgcagttgtctttttgacattaacattttaaaggttttttctgataactctaaccatatgtgtttgtattttctgtaattttctcaaggttatgttggtgttttcttttcctcttacctttcaaaaaaaaaggcattaggaatttagtttaaaattgtgtttgcagaagtaagcagaaacataagataatgttctcttcccatatttgatactgcaaagcttttggtgtctccatttctttcagacagctgtgaaccctcatattctgggatctaaataaggagcacatatcaggactaccctgtactccctgcatgctataggctgaacaccaggaggccaggaggtagtgagtttgtagtgtagcctgaccaatgctcagctacatctacttttacagttggttacttgtttttcagtggaagaaccagtccaaatgtttggttctttgattatcagaatcaaaaattgaggcaattcttccttttgttctagaattttctgtaataaaatatttgagtaaatgataattttgtattgttatctttatttttctcagccatttgcaaattttcttttttctatgcttttcagattattatttcatttacaatcatgagtctagtagtatgcattcatttctgcattcattttgatacttaaatctaggctttctggttttcattaattctgcaaatttcttagtttttcttttcattaattgtgagatattctcaattcaaactcttttaatccatttgaaaacttggagtcatcatgctcttattctgcatcctaatttaattattaaatctctagcttacttcatctctattcagttttcatcaaactactgcttagattatccattgcatttttattacattttctacacatttatagactttcagtaatttattatgttatatttgataatgcttttaaacaagacaaacaatgtcgtgtttaactaaaggatttgggagaactatgggatgttgtatatgtttatacataaatggtaaaggaaaaagcctgaagttctcctctggactgacattaatgaaaactcaaagtaaagtgtctgtttaaccagtgaacttggcaaatcccatgtagattcatctgtaagaggttatgtttcataagacacagcagcaaccacttccaaagtctgaatgtctttaaaggctcatctgtttaaataacacatccagagatgttttagggaactgctcaagactacacactttcttgaacattttcatacaggcaaggagaatggacctgaggttttctaagtgttctcaatttacattttatgataactacatgtaaactatggaattgtatctgttgctgaataactgtacaggaagcaggaccatttcatcggtaacttattgataaccctttttgcatggtggagttaccacagtgctaagtttcagcactggaacaccaggagctctgacaagggcaactcatgtttgtttagcaaaagacaagaagggaagaatgtttttccatccagtcttggctgaggtgccgatcatgtccctatacagtcattcagagaatgttttttttttttttcttttacattcttgagagggatagaagtcattgaaatctggggatcaagccctacttcctctccaatccttactggtactctttccacgcagctcaaatcttggtcagtcaaggctaaaaaccctgaagggcaggaacaaattggttttctccaagatttcagattcctctattcttttgaattctggagttttccaaatctttctttatgggccaattgcacatttatcactcgtgtcttgagtttcagctatgaagtatctaacctgaattgaattctcatttaatataccctgctataatgaataaatgaaaattattactttaatcagaaaagagagaaaacaatcacttaaaaaaacactggattggctcataaaactgtgatttcattccctagttttgcatatttaaagctttttcttatgaatatcaagcaatttctgggaattttcttcctcatttctattatagatttttttttaacaactcatagatgtttgtgtttggaaatgtctctcctgattgcagcctgctccccctcacctttcccttccatagactctcttgattaactttatgtgaaaagttataagttaatcttatttgcttcaatattaagtttgatgctactatttagagtttcaaattaagctaaaccaagataaaaatccgctattactcagatatctttgaatgtgtcagcagaaaattactgttacttatcaggagcactatcgcaagagggattaatatcttggccaataaacaatttcagtgtaaatgaaagtaccaaatgaatttgtgactggtaatgcatcagttgttatggataagagtgtagtatcacacctcagcatctgctgctgatatttatttctgactcagcctcctgtcctctaaacactgtctttgatcatgtttgtaggaacagaatatggtgaaatttactagtgaaaagtccttaattttcattttttcacctgcacagataaattcaaggagtgctcaatttatttttgttacccatgtgataaagggaatgaaaaaaggaagagacagacattacctcccagagggttagggacatgagcacactctgaagtatattatcatagctatatctgaagaccactatgagtataccactcatagttgcagagacttggcacagtcatgacaagtgatagagcatccagatagattaaataccagacaggtagcagagagccactggaagtttagtgatacccttagatctggaatccaattaatgatgttggatgtagaagcaaaaagatggcttcagatgatgtcacaggaaacaaaagcccttgtcagatctcacatttaagatcaggaagggggaaacaggttggctgtcagggggagaggggagcacaaagaatcacacaaagaggagttttactttgaagaaaagatactttgaggaataagaaatgttttacaactagataagggtagaggtacaccacattgtcaatgaaggaaaggcttgtgaacttattatctcaaactgtttaattttatacttaaaaatttaccattttagaatgtacagatttcatttcaataaattatttttaaaatacaaaaggaagcacagagaaccccatttgtgatattgtcagaccagccaggtccattacaaacaatggataactctttacagggtaccaggctctacaacaccagggataacaaaggcctgagaaacatgattcagctttataagtgaatatactttaatacttccaagggaagccagcaacagatgccttgtggaaatcttaatttgacaccatttgaggtgtttgtttacaatgacataggatgttccacaaagacagcttatttgtgtttttcttgtttctgaacatctcctgaagagactatttccttcaagtttttcttccttcaaagactaaacccaaagtgagtgctaattcaaaatgcccataagctatccttattgcttgtgaaaaggatttgcacagaatcctaactgttagaaatcatttttccctgaagggaggctacaatagctaacagcacagaacagcaatttagcccatggactttaaacattctcaaaacaaatggtgtgtgaacatgagaaacagttcttcttgggtgattgagtcatagttcttcctggatcaagatctgtctctcaaccaaggggagatacttctgctaggacataactttctctccccaaaacgcagcagtgcattcatgcatgtttctccatgaagactagttcctcagatgtagggatcataaactttgtaaacacttacagtctgctgaaatgatctgcgaaaagtaccaagtctgcaaagatgttggtttccacacttccaagtcttctaaggactctagcaagtgcattaggcaataacatttttgtttattttgttttccaaaatgggaaatgatttccataattctatccctccaaactgtaaatttctaagaaagagttaattcctaaaatagtagtgttgggttttcaacactgtccatagagctccctctgctactcagaacagggaattttccagtgcagggcaactgaaattgacaggatgaaacttttttattttaaatattctttgagaccatcaaaacattgaccttaatagaaacacttttttacatgtttgagttcgggtatctctttaataaagccaaaagtacacttattttatcttggtgattatgcagaaacaggctgctgaaggtctccttccaaaagacagatcatgaatttcagagaccaaaataactaaaatcattgttgctaagtatagaactgaggtcagaaaaccatggtcccttttaacttctggcttaggaaaatatttcatttcataaatctgtgcttactcctgatgccttttgcctcctcactaacaacatgcccaacagctctaattctagtgctggagcaccaattaccaataaccaatgttaggatattgtttcttgttcaaaccagacttctaaagaattgtgttgcctaccagaaaaacaacaatgacaatgagaggcagttgtggttagtatgagcatgaccctgctctaactgctgtaaaaataggaacaactctttgcctcatgtccagaaggaactgatgagttttgatgaggtcagagtcatcatcagaatctgcctgtcttcctaatgcttcctgacactggtggtccctttagtcaattggattttctactatctatggatattttctaatcttaccctgatctataatgatctctcttactccacactctccctcatcaccctgctctcctccacacaccaaatgaggtcctgagagaagagtatggtgattgacttactcttctcatacttttacattttgtaaattgttgacattaatactgaaagaaagaacccagcattgtgtgtaatatcttctgctgcttagttttatgttaacttgacccaagttagggacatttgagaagacagaattctgagataatgccataggattggcctgtaggcaagtgtgtaggtcatttgcttgattggtgatttatacaggagggcacagtccaggtggtcttggatggtttaacaaagcagactgaccaagccacaggagaaaatcagtagtcgtcaatccttaattacctccacatcagttttctgcttcctgccctatttgagttcctgtcctgactccattcagtgatggggaatagctgtggtgtggaagaacaaactgaaacaaaccctttgatcctcaagttgcttttggtatgtgtgctttgtcataacaatagaaagaataactaagacatatctgtttgttgggttgctaacaggattattgcttccagacccctgggtcaatgttcagtcttaagttggaaaatagatgcctcattctgatgtgagccagaatctccagtagaacatccaatacaaagattttcatttttaattcacagttataatttttaattaccatcacagacttccatgtcccaagtgtgggaaaaacctatgaaagaagagaatctgtgttagctttttggctaatgtgcaaggatacttcccagagtcattgctgttttgccctgtgaagcagagactacagccatgccctcttgacagcattcttattttggtatagattcacttgtgttttctctttgcctcaggttaaagtttgtttttctatgatcataatcatatgttgttgtcccaactccttttctcatattccaaataaataaacacatagaagactcaatgactacaaaatttaccttctgctaaacttctgtgaaagggaaggatctttacataattcccacaattcagtttaggaatattaagcccagaataatttggatgaattttcttccaagtacacatctttaaggggtcacttttccatgtctacctacggactcaccatctttatctctgtaaatatgactaagccagtttgccaactgtaatgcatgtgatggacatacgtctacttttcatcagaaccaatcgtgtccatcttccctgacggcagcagtgtgatcacacatgactcagtacacatcccatgcagttcagtctgacactgatcatagacttatgaaccaacaacagcacttattctatcctagataaagtgggaattctctctgccccttcggttttctagccctcccgaactttagcttcattccttgtagtaatagtaatcattattccttaaatggtctgttctccagttttatcaccagcttctaagaacatctggccaatccatgttggctggtggcatttgcattctgagtgtcactggcagtgaccagagtccattgttgtgttcaccttctttcccgaaaccttccatttcatcataatagatatggctttaattttaaatggctttattactcatgagtttgagaatttttgttttctgtttatgggttatttactttgttttcatctgtgcactgggtgttcagtattttgcccaccttttgcttctttatacacttttcacacgaaccatctggcagttgatgttctttcttcacaaactatggcttgaatttctaggtgtcttctgaggaacataacttccttctttttgtgaattcaattggttataagttataagttataagtttcatcttatggtgaagtatataatttaaatgactaattgcttttcctgagacaagggttacttatgtctaggttctcttttaaaggtttgccaggtttatccaaagctgttagactgatttatctgggacaggctgtttggtgtccaacagcatttctctaagtgatcttcatgtgtacaccattcttagtcagaaaatcagcacaagtcttaccttatctccttatttgattcaacttcatctgaatgtatagatctagagcatgtaatacatacacgtgtttatataatgcttcatttctaaaattactgcaaccacctcccatatttcagcagcaattttagtgtgtatctctacttacgtgtttgcagcattttaggatttatattcatcttgttagtacattatactttcctcaatagatttgatattgtatacaatgctgacatgaacatctcaagcatttatattgtttttctctgaactagtacccttatgtcactgcattgattacccatgctgaataagctaggaatagtgtctaggacctatagtcttagcactcaagaggtggagaaggaagatctgagatcatttccagctactaaacaaatatgaggctctcctgaactaaatgtaatttattgtatacatacattatatatatatgatatatatttctatttataagtatatgaacacacacacacacacacacacacacacacacacacacacacacacgtattcctaagatacaaacctagaaacagagatgttagctaagagaaagactattttgtggttttagtataccatattttaagattgttatacttaattgcaaaccaataatgtttttcaggtatgttcttgctccacgggattagaaatgaaacagtacttcagctgagttttgcttcaaattgatttgaatgactgtgaggctacataagtctgtcttcagttcagctgtgcatatgtatatacataatgtggggagccagactgacccaagactttctcagagatcctgataaaaggacaaagggaactttgttgtgtgtccttttccaggaatggacttgtatagtgggaaattaccaatacggagtcaggtagaaatataagggtatttcatagggaaaagccttacttacagagtgacctagccagccggcgtggcagcagtctgtacagcaagaagcaaaatgaaaccgaaagtgcaaacgaagtcacactacctcactctgaccatgccttcacaagcttggtcaggcacacctgtagccagtccctatgtaggcatggctacaacttcccctacagacttgcaaggccaggctgaagctagagccagtcccttacaggagtcacggtggtggtatctggcatcccttgttatcctgtgttctctttgacaccattgtctaatttagctctctgctgatcttgaccatttgccccttgatagtagtatatataatactgcacatcctaataaacttgcttggcattaagtcatcagcttatataagtcctcctggtaccagctatcgcttttgtcttttttatttctcatccttgttgtttcttatcctcagtcctccccctcctgagactcaccgtttaggacccttattcctgtgagttcagtttacaaaagttctatactctctctctctctctctctctctctctctctctctctctgtgtgtgtgtgtgtgtgtgtgtgtctgtgcgtgtgtgtctgtgtgtgtgtgtgtgtgtgtgtgtgtgtgtgtgtgtgtatgtgcattcacacacatgaacacatgcatactaattattggactcagagacatgtgcatgttagactaccctatccattttgagcctttcctgttttcctcatgccattacaagagacaaatcttcctagatttgccccaaacatttgaactgaaatgttggaatccctttcctttccagctgcagataattgtatcatgtttatgaaagtcactgccacttacaccttgggaaattgcagattgaattactgtcatgttcagcgatacaggcagagatcagcttcaaagaagagggcttagatttcatcctattcacagcagtgctgggcagggaagagagaatcacccttcttttattgcagtgctgagttcagctggcctcatcagcgttttactctagagaaaggagcagcatgtgctttgtgatctgtgcacacagagcttggattggactccagaagacatcagagtgtacatggtcactgcttcctcacatttgggcatctgtcaccaagccagaaaccaaactggttcatttactcacacgtctaatgaggtgctaaatcttagtcattatggacacaactgtccttcagttcatttgttattgatgtagattcctccaaggcctttaagcatgaccttctttgatggggatgtcatctcttattggttgatgaataaaaccctgtttggccaatagaagcaggaagatagttggaactagaagacaaggagaattctagaaaaggtaggctgagagagaactggaagagacaccatgtagacaccaaaggagtaacaggtctgggcattctctggtaagccaagaccatgtggaaatacataggtttgtagaaatgggttaataattaagaaagagataatcaataagaagccctagtcattcactaacagtttagtaattaatatagcgcctctgtgtgtttatttgggggctaatggctgtgggatctggctggaaaggaaactccagcagcacttcttgtattttaatttttcttgtactctattagaacatctttagcagcaaacacacatatatacatacatatacacaaacttgcctcaaaacatcttaacaaagtggagagagattactgagtcaagcaatcataagaaaagagggatcttaatatatcttgattcagaagtttatattgctccattgaaattctgtatcttcttcattatcagctgtgctattttatttttattggcctgaaaatcttgtcatctcaatcatgctgatttatgatgtaataatgtacctgttcctcatcttgaaactggaaccactcaagaccagcaattatatctcattcatctttattttctttcttatatactatgttgccctggctgaagcccaaacaaatatagttaattggatggatgcatgtgtgaaatcggatcgcagagttttgaattagaagattatggaaagtacattcccatctattgatggagtataatttcttaaagaacaattcatgctgagaaaatttgtctaataatagtttagcagaatgggagaaacacagtcttctatttgtgatgaaaggacattttgtggtttgggaccattttctattagtggaggaaaagatttcataacaatccaagagattaaagacctgaggaatgagtcacattaacagtctttctggcactcagatagcctgaatcccacctgagactgtatttctatgtgcataaatgcaaagatttacttagagtcttaacacatattatagataaactgggataaagttcttcaaatgatacatctgtcatagcattctaatatattctgtgatattttcctgtggtgaatatgcacaaatggttattagtgaacagagggcattcatttttacaagacttgggttataatgatcaaacacccagagccattagaccaagagacttctcagaacaaggtgcctctttgtcttcaagtcctcagtaaagtgtgataggtactgcaacatcagtggactggcttaagagcacctattgaaaaggccaggtgcattttgtcctgtgacaaaccatcagagcatggatacataggaatagaaatcaaggtatcttattaagaaagggaacacactcctgagcataaaaatgagtgagctgaggaaaagctatgcactgaagtagcttgttacataaccttcctctcccaggtttgttcagtgtatcctttccccactcctactctctacatgaagcccaggtaggggatagttgtcagctttcccctccacaggcttctttacttattatgatgttactttccacagtttctattctgctgcaaaaaaagtggtcattatcttcatgaaaactacaacattagggccataggattccgaggcctgattcacatgcaaggcactgcaacaacatgtcattaatttgtgtttactaggttttggtgtgcattagtcaagctcatattaaagtttggtgcaaacagcaatgcctacgacaaaaatgctcttgtgggcactgctacagaaaccaaatataaacaggacttcaggtgtatacacagggagtagcccattttataaaagcccaaacataaaggcctttgggattgtaaagaggtggaaagttaagagaatatcatgggaaatgataaacctgtacatttcagtttagtggttatttgatagtagaaaaggcacttagtttacatttttaatcagaacccaaactgtgtaagaaattaaaagtcagattctaaatgtagtgtaaatccagagaaaaatcacattttctcaaagaaagatggattgattaatagatatgaaaccatgtgccaatttgtaatatttttaacttatttatttgtgtttatgtgtagtgtgtagtgtgtgtgtgtattcaaatgtattttattttttctctttgtctatttgttcaaatctgtgggtttatacttcctagagctttgttttataaagatttgaggttaaaaagagcctttgtaatgagtctgttttcttttcacattgaaggggtaatagaaaactcttcagtaaaatcacaaactaccagggaaaaaaacaaacagtaatgatttgtatgtgtgtaatgatagggtaatgataaggctgtagaattaagttttatggttaaagctagataaggcaattggtttatattctttatctgaaccaaaagtgctgactcattatacaagaaataatgctgactcaggtaccatgctctttcttttggaccaccaaccagctcccaaatcataacaaggagacttaatactagttttgaatgctcagcctagcctaggctcatttctggctacctcttttaacataaattaacctgtttcttcttatccaccttttgcctctgtgctttttacctttcttacttcagtttatcttactttcactccatctcttgtctagcttgctggcagctgcctgacttctgtccctgggcatctcccttattttctcctttcctttttcttttgttcttccttctggtctagatttttttctcctacttattctttctgcctgcctatactttctctacctacttatggagcattaagatctttattagaccaatcaggtgccttaggcaggcacagtgaaacagatgcaacacatctacataattaagaaatgccgcataaacaaaagtaatactcctttacacatttaaagtaatattctgcagcataaacaaatgtaacacatttttgcctaattaaaataatattccacaatagagtcaccatacaaaaaatatttgttatcacagcccagccatttctcctgcctgtagcttttatcagccacttagatggttgaaacattcacagttgcatacaattctaccagaaatatcagtattcagatgtgttttattttctgtgtatatatttgttcaaatacatgggttaatccatcctaaagactttgttttataatgatttaaggttaggaagtatctttgagatcagcatttgtggcaaaattattgacagctagtttcaatatatggcaatattaatgacttcctattagatccaatttacctaaaatggcaaaggcaccagggtttgggaacaattttcaaagtctttatttcttatttaggaatttactgttttctacaactatctataatattctgagaaatgtgtacaattgctcatcagtttgtcagtggttgtgtgatagagataaattgtctacaggtatccaatcagtacggtgcctgtgcttcatgaatccactttaattggacatgactggtctcccttgttcccccctccccaattaactagaaagacacttagcccatttctctcagcttcatattccgagtcaatctgaaagacggttctaatctatgttgtttagccctttgatgactggatttttggatacaagttcaagttttagtgctttgatcttctaccagagccagctacacacagtgtgttattgtgaagggtaggtttgcagagaaagtgtgctttgaataatcgactcttgtacagtacttctcagatcattatcttatattccttaatattttgtaaacccatttcagccagtgccagtaatattggctgctagcttatggggagtgtcatttattttcagctttagttagcctaaagtgtttttggaaagacatatgaagaatcaaaatgaaaggagaggatgccaactctacaaaaccagaaccttgaaaactgtatcactaagatcagggtcttcacagagaaacccactttgactcaaaggactctagattgtctctcaagttccccttctgctggggacatggaagataacccctgccactagctcttcttggttttacaggttagcttctttagagaattttatataggaagaagaaattagaaattgatagagaaaacaactgatacatttctctgcagaaaaatttcactgttacttggagtcatagtctatttctcaagccccgaggtttaggataatttttacactgacttggatgctacgggtaagatcaaacttcaagtcacagactgaaagtatgaaataattggataatggagtacacaaagttaatatgcaatttggtttttgatcttgaagttactggactccagtcacccagcatggctaatttcacaacctccttgttcaataactcagacttttggagaactggaaacaagaccttcttagcattctgatattccagttgccttctgactgtacggggcaaaaatgaaatgaggagattctgcatgtcccacctccttcaagctatagtctacgctgtggaaggaataaattttaatttgtcaaagaacccctccaataatttgctaaaactttttgacaatcttttattgcttataggctaatgtctcaaatcattcacatttaccattttaaaaatattttataaaatacaaatatagttatttctttatcttatggtttttcaagacaggattttgctgtctagctttggagcctttcctggaacttgctatgtagatcatgctagccttgcattcacagagatctgcctgcctctgcctcccgagttctgggattaaaggcatgctccactacttcccgacttatacataattctttatctttaattacacaatcaaataaacagttcaagcagttatcaaagcatttttttctgtgaaagtatcaaatcagccttataggttaagatctgcattttgaaaactaaaatggggtagaatataatatgtaggtgagcactgcatgtactataggccaatatttcatgaactttgcttcaaatatacttctatggtaaaatgatatgtagtatcataaatatatgttccattaaatatgacatgcaaatttatcgcctcatgcaatagctcaataagtatttgttggaaataaagttgctggaagtaataacctatggaagtgatttgtcaggatgattgacataatagagaaatcctatgatctattaaaatgaatgaacttttaaggagaaatgagtgggctttgtgatcaggaccatgctctgtaatgttttcaattctttacttatggcaacaggtgcatagtgatctgttgggtctataaatctcaagtgaaaatattctatggaaaatgttgcacatcagtgttgtgatcttggaggatcagtcacagctcccagaatcattagcttttttcaggtcttttctccacccagttcactgtgatgtggacaggaattttgcaggatcctctgtaatcttatatctgaactattgtgaacacattcaggctgttttttttcttcaagttctttgagagaaataatcatgactgatttagaatagtcacacttgacatacttatcttctgtagattaaaagcatttgcatagatgaccatggttaatatttaataggagtccaaaactaatcaaataataatgcaccaaagattatagcagaagaatcaatgattaattaagaattaatattacaggaacactctgacattgctgctgggagtgcaaacttgtacagccactatggaaaccaatatggtgatttttcaggaaattggggatcaacctacctcaagagcctgaaataccactgttgggcatatacccaaaggaggcatattcaaactccaaggatgtttgctcaactatggtcatatcaacattatttgtaatagccagatcttagaagcagcctagatgccccacaactgaagaaaggataaagcaaagtacacaaaatttgcaggcaaatgggcagaactagaaaaaaaatcctaaatgaggtaacccaaaactggaaagacaaatatagtatgtattcactcataagtggataccagacataaagcaaaagatactcagcctacaatcctaacccgagaagcttgatccctcctccagaaacagatggaagcagatgcagaaatccaaaactaaccaatgggccaggcacctggagtacaattgaagtgagaaagaagcaaaaatatgaacaaaggaatcaagaccatgatgaggacacccacagaatcagctgacccaagctagtgagaaatcactgactcaggtctgacaaatggggaacctgcataagaccaaactagattcccttaatataggtgacaatggtgtgactgagacaatctatgaagccactagcaaagggtccaagatctaactctaaagcacaaactgacttagttgagcccattctatataggagagatggcttgcccagcctagacacatgggtgtgggagtgaaggggtgccttgatcctgcctcaactagatgataggacagacttagtagacttactaggggtggccttaccctctctgtggagtagatgggagtggggagtggggagtgtcggagaggagaggagaactgggattggaatgtaaaaaataaattcataaaaaaggaaaaaatattgcattgaggatctaccactagtcagccaacaatatttccagacagtgacaaatatagtaataaacaaaataatccccacaaaaaagaattacttttacagcttttctaaaagcacaggtgagatgagtttatgtacagcgcagggagtacaaaagtacatgtgataatgttcacacattcttggaagtttgctttattattgatactggtgaaaacaggagtgattacaaaccaaggtgcttttaatagagggcattggccacaattggtaaccagaaggcaaatgatttctcaaggtgtttgatgattcattattcttgtaactaagattgctttaataatttcttttctgaaagctcattacagtataaagttgatactgattttcttattttataaacaaggaaaaatagaatttgtctttattgatagcacatttacacaattagttatttctggttgaaactgttgcatctctttttggattctataactaagatacaacccattgtagatataaaagtgcagcaacatttttggctgttatttcgttatttctacatatatggagagagacagacagacagacagacagagaggagagagagagagagagagagagagagagagagagagagagagagagttgagtagttagagaggaggggaggatatttcttacaagtatattgtatggaaatacttttaactttttaaaaaaggaggcaaaaatagattggtataagtggatatgctcttatatctcttctcttagaggacagacttagcatttctctaaccctcatgatacacactgaatttgacctgttgaggaacaattcacagcacttaatttattgagatgtttcatcattaaaaggatgttgaagtttatcaaatgcttttgctgcatctaacaaaaacattctttttttcctttcctctttaagtaatattttatgtttactgtttgtatatgttgaagcattgctggacatagtagctcaaaaccctgtgtcaagtggatagtattttgattccagccaggagctcgggtttttagatgaagcactcaaaggaagaaaatataaggctggacaaatgaggggcaggactactctttattcctctgtgcttccaattataatcagtacttcgttgcaaaactcctacctttttttctggatctcctaccttttaaacttgtcaatgtttacttccatagaaatattatatgctcaaaatgtttactgtatacaggcatagtaattaggtttcaattatataaagagaaatcccaaattaaacactaacatacacatcttaaaaacaaataattttaaatgactgtcaactcaaaaaagtttagcatcatgtgggaagatttcattgttcctgcctctgtgggtttcctcgagtaggttaattgatgttggaatgtccacatagaatgttggtggcagcattctacgggttggggacctgaagctgaacaaacaggagaaagggttcgagtagcagcagtagtagactgctcacactgtggatgcagtgtgaccagctgcctcatacttctcctgcaccgtgttttctccatgatgagctatgcccttgaactgtgatccaaaataaacatttctttaaggtcctttatatcatgtgcttttcttcattctttatggcaatgattaacgtaactaatacacatgaaaatgccttaagttcaaacttttctcatatttatttattatttatttattagtttttcaagacatggtttctctgtgtagctttggagcctatcctgacactagctctgtagaacagactgaactcaaactcacagagatctgcctgcctctgcttcccgagtgctgggattaaaggcatgtgccacccacacctggcccatttctcctatttaatgtaatgcagacagtgatactgatctgagtctctacacccatgtgccccaacattgtttatcaccttcttgcttgcagtcttaaaaataattgaaggtaagcagctttcagctttccacgaacattctttgtttcaaagtcaaaaactgggtggctgatgattttctctctttttcctttttatttaaattataaacaagcttcttttacatgtcaatcccagttccctctccctcccctgctccccacaaactctctatccaaatccctttgtgctccccctgcagggtgaggccttccatgagggatcttcaaagtctgtcatatcatttggagcaaggcctagaccctccttcatgtttctagactgagagagtatccctctatgtggcatgggctcccaaagtccatttgtgtacaagggataactactgatccactaccagtgaccccatagattgtccaaacctccaaactgatctcctcattcatgtggtctggtacagtcctatgctggttttccagctatcagtctggtgtccatgaactcccccttgttcagctcagctctttctgtagttctcaccagcctgttcttgacccctttgctcatcactccttcctctctgcaactggattccagagttcagctcagtgtttagctatgggtgtctgcttttgattccataagctaatagatgaaggttctagaatggcatataaggtagtcatcaatctcatttttggagaagggatttaaggtagcctctctgctattgcttagattgttggttggggtctctgaacctttccctaaagagaattaaagaattctctttaaaattataatggctccctctattatggtatctcttttatttctctcctctattctttccctgactagatcttcctgctcccttatgtcccccctcccctcttattctccccttctctttcttctaactccctctcccttcacccatgctcccaattagcttaggagatcttgtccctttccctttctccagggaaccaagtatgtcccctggagacatgtctctcttagggtcctccttgtttcctagattctctggtggtgtggattgtaggctgatgattttcaatgtcttgaattgtgggcagtgaaagtgaatcctcctgtgatcaggcatcacagtgatgtggcactgtgagatagagaaggattgggaagctgatggctcaaatgtcacaataccttgatgggtgatgttcttctgtatatattttctcttattggttgatgaataaaacactgattggccaatagccaggcagagggcttaggcagggctatgagataagaaaaattctgagggaggaggcagagagtggccttggagagactccatgtagagactgggaagataggatgaggctggtgttctctggtaagataaagccatgtagaaatacatagattggtagttatgggttaataattaagagaacactagccagtaagaagccctagccattggccaacagtcaagtctttgtgtgtttatttggggctaattggctgtgggacaaggctgaaaagaaaccccagctatactacctcatagcatggatgattgcttaatgtgaaaactttgatccagcctaccattgagcaatataactttcaaatgttttgtcaatgattggggtcatgatagtttgatgctaaagtccatagttaaatttttttttctaaacactcgcttctccactctctctgaatgcttagtgatgggatattattattagaccaaatgtcttaaagaaattattttagtctgaaaagaaaactaaagagatattttaaaaattttctagcatagtattgctttatcccagaatattttattctgggataaagaggaagttatttaaagtgatagttagttccccagatacttattgaagacttaatgtaaaacatttataggacaagaaaattcagtaacaggtctgtgtgcactccaccagtcttccctcactcccccttcttctcaaagtaggccaaactctgtgaagtgcaggtccatcgactgttcaaggtctcccactcctcttcagaagatacagtctgcttcatggttggcctggctcatctcaggctcctttctcaacacttttccccataaatggtgaccttcaggtcacttccaagaagaaaagtctctgtcttgagtatgtgaagtagaatatggtgccttaccactgtgaaagccaatgtttgtcttctgcttccttcccaacatcttttgttccctctcttgatccctcccttcttcttgggattgtgggagtgacctatcatgatcagcaaagtgcctcatttcttcctatgcttctttgttttttattccccatgttccttctttctctttactgtgttaattactacttcatgtctttagtcttgatatgactttattttaggaaatctttctgaatccctttaatctgcagacaatctgactccttcaagctcttatagaactgaatcattcccaactataatattctccacattttggtaactatgaattgattacttccacttacctgatagataattgagtcccagatgctaacacaaggtagatgtatatgataataaagaatttctaaaatataagtgatatgcattctggttccaaggaagtgatttgagaatttttttccttttatgtactgagtttataactaattttaaagatgtttcttatgaaagcagagcacactaaatttttatttgttatgatttcagacatttaattttatttgaagagaattgtgggcagaaagatatggaataatgtggactctggcagtatcattgtcaatgtgaagtttatttaatatcactgtaaatactcatgaggaatagagctataaaaagtaactgtgcttccatttttagacaagtcccttctttggtatatagacaagtcccaagcacatactgtctttggctttgcattccagatagagttacaccctatgcctggcatttcattcccttgagtatttacataatccccttgactgtgactatcaatttacagagcaaaaggattcccatcataaattcttgaagtcgtatacttggctgcatcacaaaatgtgttttacctggcagtgcaagccctcaggtgatgataatttcgggggaactcgatacaaaaccttccctagagatgatggtgaatagtcaccagatattcagtgaaataaaatctgctaaacaaaaaccacctttggcatgttgtcttctttcaacaacctctgactttagaaggacattttactacacaaggcactgaacctctctggagcaggagaatggctttgtacattagcctactgtcatcatttttcaattttatctttcagacgaaagatggtacaggtttttgtgcttttggttttgtataaacaagatagccagcatattttaagaatggtggagggtaccatgttaagcttttttagtgtatcaagcaaaagttcatattagttactagatgaaaattattgaactagctattctgtgagtagagagaatagagtaaatcttggctggaagcagtaaaagcagcacgatgttgctgattcttcattcctttatgtgtacatttataatctataaaacctagaatactgatacctgtaataatttcaagtgccaagtagcctgcataccattttatggatgttcttcagatgagtttctgctatcaaaatgaaaagaaggaagaaagctttttgaatatgccagtgtccttcagtgtcaatgtcctttcaaagaatttctcctatacaaacagaagcactgaagccactcacaaggatactcttggatggttgagacattcacatttgacatttgtggaggttgattcacatgaatggaaactgctagaaagattctgagtgactttatcaaatgaacttccatgcagagcaatatttaataatgggtttattgacttgctatattcctcttttgtatttctaagtcagcctttctatcttgtcataaatttcttcaatttaagtaaacttctggcatcacccaaacagttcttaagtacagtgcatgaagaacctgatacaaatattagaaaatggggcttgagcagagagttggggcatgtatgttctcgactgactgtgcattgggctctgttatttgaggtaatgttggaatagttttgctatgtcagtagtgctcaaatttagaaccattcatgcaacttggtgcagtaaaaattgctgatttctaaattctttctaattaagtagggtatgatataacaaaataattttgatttttctgaaattttctaagacagtaaaaattatgttatggtatgtgttttgtaaaaaagaaaaacacaatcttcctctctctggctttttaattaagtgagaaacacagggattattgagaatccaatataaagatgtagattttctacaagctaagatcattatttatataggaagcaatttctatagcaagtcatcaaagggagaggactgattactcatctgtacccagctcccaactgagggagtgttaagtactctgttgaactaaggtcctgatggaggggaaaactgagtacagacctgaaccaagtctcgccactattctcagtcaatttcagtaaagaaaaaggagtgatatgatatgatttgttatctatgtaaaaatgaagggtatgttgaggatcactaacaagagtgtgaactgtgtgaaagacttctcgcacattcttcagctcttcagctctgtttttgaccatagcacattctaaacttcaaaagtctgaaataacacacaaatgtagaaaggcgaagctgactcccagtcttggtgtttgtaggctacaaaagtcttctctaatacacagaatgacagtatttatgatctctgttcagaagagaacaatcttgaatatgtttttcaaataatgatgtagagaatgagtgtatttaaatttaatattgagcatgaattgacatgctctttgtgatccatataactaaatactcatatttacatggttgggtatgccactatacacttataaaaatctttccagtcagtatactgaaatgtaataaaagatttatttagctcataaactagtaacagaaatcaaggagttactttttatattatgaatcacaaatctcactggaactattataaaaatatgtgaaacaatgccattctatgctttcaatgagtattacatattacaagtatcattacacacaataaaattctagcacaagatcatcgagtatgttaccatacttcctgaaatggaatatttcctgtaaaagctattttctttttaaaagcatggttctgtatgtttcttttattaccacatcattttcttcatagataatcctttatgagtgcagtttgctgcctcattatggacacattggatagcctaccatctttgtcttgacaagcagtacactgttagaataaatatcacgatattctgctcagaggacatcatgagtaagagtgtaacaaggaatctgttttttttttcttaaaaaaaaaagaaacaaaaaaaggaaagaaactgaaagagtacttggaagttttcagtggaaaggagaacaatatatgaatctatatgatccttatgaggtcatctaagctccacacaacagaaaacaaaccgtgaaaacaatgattcaataaagaagatatctgattataatgaccagttttctccaagttctcactgatttgtcttgggtgaggaaattcacatcaaacattcgtatgagagcatgtagtcctgtgttatctttcaatgcatgttatagaaatttgtatgtgacttttacaagtaaaaattgataattttccttatatccaagtgtgaaacataaggtattgatttggagacatttaacatattggcatagatgatttaattcaatgaattcagaaataatgaaactattcagtttctgaaataatttatagtgaattaatggaaagtttaaagttaattacctatctgttattatattcagtcttgtatgctactcaatgataactaatgcagcatcaaataacttaatacagcaaatctctggctattatttttaccaagaacataaaaatagatagtttatctttagtgaaaagctgttctccaggacagatggaaaggttaaaaagggagaagtacaacttgcaacaaatattgatatttttagatggttagtagaactttcaacaatgttttttttttctcagaaaagcaggaaagtgatgacctgtgaatgttcataatttaatttccaatttgtaactatatttgcacacacacacacacatacacacacgcacgcacgcacgcacgcacgcacgcgcacacacacacacacacacatccaagttgtcttgtataaatccttttgtctcattaacagggaaatgaactgactttccttattcttcaaatgtcaaacataaaggtcaatcaagttatcagctatgtctattcttagtgaggaaacatttaagttattcactttttaaagtcataaatgtgactattataaatctcaaagtttccaaagagccacaaaagtcaatgccaaggtactattcttgcagtgtaattagccttgttaaatttatatttataagtgaggctatgcaaagtttccccttgaaatagtctctgaaaataacatctatttggtggaagtcatctatcagtaatttttaagaagtattttttttttactatagtgaattaaaacagagttttgttaatagtaaacaatgctctcatgctattttatttgggaagaaggtgagacaacttggcttctgtttctgtgaacctccatctgtgaggagaatgtgtttaggataaatccttaatatcctttttataaccatgtttgtcatttcttattcaatgtagattactggagcagctagcatttattttctttcccatcgcctgattttggtaccttaaaatctgtcttccatttgttttgcatttattcatggtctaatggctccctgtgattttcaattagaattttcttaagggatgaattttaagatctttcttattatataatggctgttaatgataattatgagtttaaaaagaaaagcttctatttgctgacatcttgagcacttatttgcttctatttcaaccattaaatttgattatatagttcacttgagtacatactgttacacaaataccatgtctcctaaagaacatatctgtacattgaaattcagagccgacctagaccacattaatttttgaagaatggaatgtcttcctttataataaaaaattactttggaagctctacactccaaagtaaagtttgactttggggtatcaacttgtacaacttccaggttgtacaggttttgaatataacagagtcacaaagattttatcattcttttctcatattcatcaaatcatcttagtggtgaacaaagaggttactatgacatgcacatcatccacacaggtttgtagggagattttaataaaaacatgccagaaaggaaattctgttaaaggtataaataggagttcagccataacaatccccactgctactcattcctcaaatcatataatacgctctgtcattttgacatatagcatgtttcttttcctctatcacctttaaataaactggattgtatggggaataaaagaaaaaggggactgatggcccctgctgctatttgtatcattgaaacatttttaaatcagtggatgttaacttaataagggaaatcccactgacttcatgtccctgcagacaatcaaatggtgtggttgagtctgtgcctctgttcagtcattctccaacacaatctgggaacaaatgacagattccaattaactcaaattagattaagaagagagctgctaagtacttcagcatttttcaagcttcaaagatgccaggtacaaaaatgttaaagggaaaaagatgggctactactttataaatagtaaaagcagcaaaaaccaatccaaggattgtgaagtgaatgctcctgattttctacaagaaagcatttaccatttaactcaaatccaggctttgaaatgccattgagcctttgctagttcttggttccacttttgttgttggcttaggaatgcagaggatattagataagcatagagaaattacatatttaaaacatatgtgcaatgggaaatattttaaacattacttttgaaactatgtatgatatgatctttctgccacgtgtgtgctttacaccagccgcccgcccgagttagggcctaaatgaattcacagaaacttgtattaggttcaaatgctgcttggccaatgactaggattctcatctgttagctcagtcttaattatcataaatctatatattttataagacttatttatagggaatgacttggctggcaccctctcttgctggtggctcacatggcgctgctggaggaggaaggggaaaaagggacacttcctatttcctttgattaaatataagtctctttgctatgtcacttcctgcctagatcaccacttctctactacatttcccagcatcttctttgactcctaggcctctctaacttgctgtctcatttgccaaactgtattttattcaataatcaataagataaacatacaaagaagtacattccccatcatatgtatacatacaaaatatagaaagactcatctttacagcatattatcaaatatgctatataaaaatgcatatcataaattttactctaattttattgtttgagaaaaaatatttcagatcctcattcaagtgcttacatcttgtaatttctcatgatctgttcctcagagaatgatacaatgagctttcaattctttggcttctaatgctctctagtttcttgaattctcatacactatgatattacaattgtgaaggtaatttctagcattgataattattctaatgcaggcttattatttttagttctaatcttgttgctacatgaaaaaatgtaaggtatccagatctaacatgataaaaataaagagcaattaactaaaatttgaaaataaggactgcataaaggaagagagacagaatgaaagggaaatgtgaaaagggcagtgtgaaagcaagtagcctgtctacctcactttcactatacaacatgcaatgccactcattcctcaaagaaagatatgacttacaaggagtatattcttcaatgttttatgttacaacacactcaacaagtccttcagagtctgtggcttgcaattaatggttgctatatttacaagggataatttgagtttggaacaataaaaaaaagagagaatttttgtgaaactaattaaggcacattgttacctcaaaatcattgagctcctatggtatgctctgtaatccatacccttctctctcccacacatcacattagagtctgggagctctaagctcttttcccaacacatgaagaggaatggtataggaaagcaagtttcagatccaatacagcatgcatgattcctaccaaccaagaatgagaacattcaacccacatgttatttaaactaggtgaaattcaagctctccattagaatctctgtgacaagagtcttgaggaagacttagccaaccacttagccatgattagaggagtctcctatcatgcctgtgttatggcatgatcaggaatcttaggaataaggaggacctgggaaggcaatcatgtcttaagtaatcaggtcttaacaccatcttgccacgaggaaattcactgctccctgttgtattgaaaatggagcaattatattggaagtcacagcacacagagtgactatttttagttatggaatactgaataagctttttccaaaatgcttttgacctacacaatgaatgtattccttattgaaatacttcaaaatttactattcatataacatatggtttatgaagaaatatttaaaataaactatcgagcatttaaagttgatataacctgtcaccaaaagggtttaacagtgtcctgaaatgtctgtagcatttccttcaatatctgctataaaattttcttctgtaaagctgtttaatttataaaaataagaacttcccttgagttccctaggcatagaattttatgtggcaaattatgcaaaattttatgcaattttcccaaattacacatatcatttaattaatagacgcaaaccttgaaaattgaactatgaagttgactggtcttgccactacatgaaagactgaagggccactctagcccaataaggagtccagagcctccctccagtttagataaagcttcagttcttatttttggttttgcattgatgaaattttaaagtgattttttaaaaatgcctgtctgacatagctccaggagagtctataagagaaacacattcaaattcctttatttgattctctttaaattagtaaaatattttaaacatttttaatttagctcagtagaaacagctttcaagttattccccaaattctctaactgcaaattaagcactactttcaagataaaattgttagcctgcacttcactaaaattataaattgtcaaaacataataagtctttcttaaatataatgaaaatcttgggtacgtctcaaaatgaaacaatgtggatgcacatttaagtgggaaattaccaatatggagccaagtacaaatattagggtatttaatagggaaaagccttacttacagagcgacctggctagccagtgtggcagcaatcctaatgcaagccaaaagggtgaaaagtgaatgtgaaactcagccaatggaaactcttactctatgtcaccctgaccacgcctgcaaggcatggctacaggttcccctactaacatcttacatagtttgtgggcaattgggctggggtactcttaaattttcctctcctttctacctcatgtgaatgctagccttccccttctctgtgcctcgtgcccttccctttacatccgatctcaatggggagcctctgttctactgttctttgcttatctgtcgttttatgtactgtgggtctaaacccacgcttctcccacaaaaccaagctatgaaaaatcggaaggctgtatcattccttgtaggtccactccaagagcagagccagatatgaagtaaactcttttaaaatgtttgttaaatatgggaatggataccagtgtaatggggacaatatcaccgtctggctttcagggcatttgtgaaaatgaaagtgttaagtaaggtgtgataagctaaattttaaaacaaatagcatgattcctctcagcaacacaagctttagtaaatgattgagaaattgcactaagtcaaaaatttcaaaactgtcgaacattgtgatctaacacatgcaattaataagtgctgacattgcataaagtaaatctaaaactgcccagtctaatcacccatctattaagttctccttgtttggcctgatctttcatggggttaataaggactatctatgtctcagacataaggagaaatgacaggaaagccaacaatagccgctgtctgccttggccttcctgcgacctgagcttaataaggtagacctgtctctgtgctctttggaggtgaaataaagcaatggtctgatgagggccacaggaggcgccaggtcctgacaggctaaggtgtgacttgctgaatcctaaccatcccagacttttaggactagtaagtgtgtgatggccatgggaagtaactgtgtgcaaagcccacagagactaaggaaaagaaagggcaagggagattactggtcatctggtctctcagttcacatgcaaagcaaacgccaagtacaacagcaaacataacctttgagcattatttctctaaagcgtatttaccaaatgctcattcgcttatctctgaagacttgcttaaacatgcatttgtaatgatgtgtttctgactttcttgccttctgtttttgtaactgttgctgtttttatatttttcagcttttaaaaatatattacctgcttggacagtgtaactctgactctcaggaagaaatacagggaaagggaagaacacttctgtaggggaaactgtagccacgccttcttaggggctggctacaggagtacctgaccaggcttgtgagggcgtggtcagagtgagtagggggactgcgttttggttttggtttctcttttttgcttcttgctgtacagactgctaccaccggctggctggttctctctgtaagtaaggcttttccctattaaatacccttatgtttctacctgactccgtattggtaatttcccactatatctggtgtcagaagtgggatctgatatgtgtaatatacataggattacttctgtttctgatagtttcctgtaattataaaaacagagaagttaattctgtattatcaggaacaaattctgcagtctcaatatgtaacacgactctctctgcatactgagaatcagtaactatattaagaggttctgtaaaatccttaagtaccatgagaattgcatataattctgccttctgtacagatgtatatggactttgaactactttacttacctcacctgctttataacctgccttacctgatttgttggcatcagtgtagaaggtaagaactccagaaatgggagtttgtcttacaatacgtggaagaatccagactgtcttttttatgaatttaattctgtcagttttgggatagttgttgctaattgttcccaaaaagtcagtaagagctatttgccaatattcattatctttccataaggaagaaatttcttcattagttaaaggtactataatttctgctggatcttttccagtcagctggtgaagtcttaatttaccctttaaaatcaaatcagaaatcttttctatatatgtctttaactttttattctgtttatgtggcagaaatatccattccaatatagtgtcttccctctgcatcagaattccagaagggtattctctggatggcaagataaccagaatacagtctaaattaaggtttatccgatctacatgtgcattcaatattctgttttctacccattgtaactctttttctgcctcatcagataatattctaggactgtttaggtccttatcacctttaagggccatttttaaatgctttaagtcatgtccttctacaccaataattgtctgtaattgagaaatttcccctaataatttctgaagagaattaagagtttgatatcgatctctcctaatttgtaccttttgaggtctgattctctgtaagtctatcttgtaacctaaatagttaatagaatttcctctttgtatcttttctggtgcaatctgtaatccccaacgaggcagaacttcctttaccatttcaaacatacgttccaaagtttccttattagaatctgataaaagaatatcatccatgtataacaagagattgtgaaaatttcttacgaattattcccaaaggtttctgtataaagtgttggcacaaagtagcaaacataggttgcataatgctttattaacactaaactttcttaatgccaatgagaaaggacaaacagctgcagaaagacactggactacggaaaaaactgctgaactcaatcagccagtatacttcaaagatgtactaacctctgtatggaaaccaggacatgtattacgttggggtaggggttttgcattggtttctacaggagaagaaaaactttggataccatcaaagttgatcaagattcgactggaaaaggaaaaacctctcgacgaggacaaatgacaggtattctactaaggtatatcttataaactaaatagaaacctcccaaaggaaagggaagtgttttgcttttatcttcacaggaaaactcatcttcagaaggcaaaggacactgcatgggtagatacttaagaagaaaaggtagctataaccatcaaatagaaggaatgtgccatacggtaaactttacagctgtctctcaaaaaactctatttctctttatttcctagtccctattcaattaaaccaatgctggatttagaggtggatttggctttcctcctctaaaatccaagcacattatttaactaagctttagtgtttctgtgttgtatcaagaagccaattgatgtaatacagaataaaagaagaatttggggactgtctttgtcttttcttggatctttctctcaaggtgtacaccctttcataattgttatgctctcatggttgcattccctagcatgtgtacatacacaagcaaacatttctctgctaactgtttatgtttgagtcccacacagccaatgaagacctgcctgacagcaatccctggacaccctggaaagaaaatgggccacacctcctcgactgcactggatccaacttgctccatttcaactgacactccgaccagaggtttgggtactgacttcaatcaagttgaggatttcaagcgagatcttcagtcaagtgaatcccatctaacatggactggatactaacattttctttatacaggaccccacatgactatcatcgtcccatttcagcaggaagtagcttggagaatgctacgccccctttccccattgttgtcatttaggatagtgtatatacctagttaggaatagcttcctactgttaagttttaatcctcttttagactaaaaggggaattgtaggggaaactgtagccacgccttcttaggggctggctacaggagtacctgaccaggcttgtgagggcgtggtcagagtgagtagggggactgcgtttcggtttcggtttctcttttttgcttcttgctgtacagactgctaccaccggctggctggttcgctctgtaagtaaggcttttccctattaaatacccttatgtttctacctgactccgtattggtaatttccctctatacacttcattaaaaaaagaaaatgtattttcaatgaaaaggaactgtaactaaggatttataattacatactcaatatatattattatgtgtaatatattattaagtatagcatataattacatatatattaaatgttatatacacatataattatatgtgctattccccattttaaaatactaatatttagaaaagattaggcaattcttttaatttatggcttctttagtggtttttatgagactaggtcttactgtgtagccatgactggtctgcatctctttataggccaggctgacattggtggtgctggcctttaatttattccatttttacaatctatctttccctaaaataaattttttttaagaaagtgtcagtagtaatgttaaaatttatttattttgtgagtaaggcatacaatcatgtcaaaagatttgcatgcagtattatacttgattatcaagaggaatttaagttatttaaataaatatacatgatgtttttgtgtgtgtgtgttttttcttgtggtcatttcttttaacccagtcctttacttgcatgacttttgctcttactgactaggaattgtaatttgttcctttgtaaaggttcaggactagggacatacttggagcataacagattcttaaatatgtattatgaattatacacagacacaattaagcatccagtatatcaaactaattgagctacagaaccttagaatggcaatatttatctttaaacatattacatacatctaatttttcacatattgaaatgaatcttagaagtacaaagcatattaaaggaaaatttttctaaaaaaaagaaaaatcctatgttttagaagttgtacattgattgcagaattgaatgagaaatataaagaatatccatgtatcttctttcatggcagacacagaattcaagagctcacaacacaactttgttggatgtagtgtagcactaccatccatggaatgtggttcacactgacacacacattattctctgagtctctcaaactgtgtaatgatatgtgcccactgcaatgttacatgtattgttttcatgcccccaaatttgcctgtgctctgattccttttcaatctcaacaacttttggtactcaccaaacattttaatacctccataattttaccttttttcagaatgttatacagttggcatcctactgtatgtttttaaattggtctttttcactggtcagagtgtcatttatttttttcaagcatagaacaaattggtttactatgttttgtttacccaatagccttttcttgactatattgtctttattcctctcctgaataaagattagttgactcgtgtatgtacagctttggtttgttagtttttttcatatgcaatttttaaaaagttttttccattcatttatttagctcataaataaagtcatgcacaattatgatacataatacagtatgttcacaaaggcatggctaaattaaaccaattaacatgttatatcacacatgttaagtgtttttgaaaacacttaaagtatactatctcacaacttttaaaatatagcatattgttatcaaccatatttatcatgctctcagtagacctcaagacatcagagagttcatgcctcttgtccaactgcagttttatatccttaaaccaatcgtttccccattgttaaaagacccaaattgaagcctaatagccacagttctgctctctgttcccataagttcatcatttctaggttacacataaaattgaaattgtgtgacactggaagacaaatgtcacacaatttcaattttatagtttgttattttttcccttaatggattccatttccaatgctcactgtaatgtgacttttgaagtttggtaatggttagtcatccagttttgttcctgttgttgatgtgcaggttggaattctgggtcttttgcttctccacataaattttagaaatagttttgaaatatccacaaaataacttgttaaaattttgtttatgactgtgttgaacacatacgcaaatgggtagctatacacaaatagcatgagaatactgacatttcctctagcaacacaaaatatcccatttatttagttctttgctatttttcaagggggtttgtggctttcctcatatagattttagctattttcttaatttgcagatgagtacttcatttttggaggatgctaacgttaaaatttttaaatttcaaatttcacatattcattgtttatacataatgaaacaactgaacttcatttatcaaccctatgtagtgtcatctgtttataattgcttttgagtcctagagttttgttttttgtttttaatcgatgttatggctttttacataatcattagcttcaatgttgaatgaatgacctcagataatgaggtaggaaataagtgaagaaatattttccctgcttttatcttccagaataagagtagaaaattgctaaaatatctttcttactaaacagtaaacattatcagtctactcatctagacctggtgttttctttataaaagattatgattcattgattcaatttcttaagtaattgtaatcctattctcattatttcttcttaacctaagcagttttagtcttttataaaattggctatttgttctaggaaatcaaatttgttggtagtgaattgttcataatattcctttattatgtttttaatatgcatgggaaactattataatgtgtcaattttcatttctatagtattaaattcttacttctctctagtgataaatttgtgatttattaaagcttgcctgaggattcagaaagcaaagtcagccacagctatagaagctaggcacacactttttttttttaagatttaaaaaaaaaaaaaagatttttttctccccttatattatacatgggcaaaattatccagtataaggaacaggtccataagagctagccaaagcattaggggcagcccctgctgccattgttaggagtcccacaagtagaccaagctacataactgtcacatatatatgtagagggcctaggtccgttccctgcagactccctcattgttattatcctatgagccaggttagttatttctgtgggttttcctgtgatgtccttgacactgctgtttcctacagtcccttcctctcttcagaaggaatcccccagctcagactaatgtttggctatgggtctctggatctgtttctaacagttacaggatgaagactctctgatgacgaatggggttgtcaccaatctggtcacaggatatccagttcaggctacatatccaccattgctgggagtcttagctagggtctcattgtaaattcgtggaaatgtatacctgaccctgaaatgcatcccctttctagtcatctctttcagtactcttcccctctatcaactcccccaacctagtccctcaggttcccattgccaccatcccccagtctacccaggagatctcttctatttctccttctcaggatgatcatgcaaaccacttggcctctacttataacttagcctctctgggtctgtgattatagcactaatgttactttttaattctgctttaaatcctgccttattagccaatgctaggtttaatctggaaatatttgatgtttgtttgtttttctggttgttttcttgttactaatttctagtttcattccattgtgattccaatgaagatattatatgatttccataattttaagtttattaaggaacgttttatggcatacaatgtcatgtatctttgtaatgctctaggttagcttgagaagaaagtgtaatttgctgatattggacgaattagtctttagatattgattatactcctgaccagtggtgatgttaaagccttattactgtgctaaaacactaaaagcaacttgggggacgtgaagatttatttggcttacaggttgcagtccaacaccaagagtacacaaatcaggaactctaggcagaaactaaaacagaggccacagaggaacagttgatttctggcttcctccatggcttgctcagctttttctttctttctttctttctttctttctttctttctttctttctttcttccttccttccttccttccctccctccctccctcccaccctccctccctccctccctcctctccctccttcccttcttctttctttctttctttctttctttctttctttctttctttctttctttctttctatctcccccctgtttttatttcaattagaaacaagattgtttttcatgtcaatgccagtttcctcttcctcccctccttccctgacccccactaatgccctaccaatcccataccctttctgctccccaggtagggtgagaccttccataagtgattttcagagtctgtcatatactttgggatagggcctaggccctcctccatgtgtctaggctgagggagtatctttctatgtgaaatgcgctcccaaagtccattcttatgctagggataagtactgatctactacaagaggctccatagatttccaaggcctccacactgacacccacattcatggatcagttccatgttggtttctcagtgatgagtatgggggccagagctccgccttgttcaggtcagctgtttctgtgtttttcaccagcctggttttaatccctttgctcatcaatcctccttctctgtaactagattccagttcagatcagtgtttagctagggctgtctgcttctacttctgttagctactagatgaaggctctaggatggcatatgagttagtcatcaatctcattatcaggggaggatagttaaggtagcctctccactgtcacttagatggttagttggtatcatccttgtagatctccagacatttccctagtgcctgatttctctttaaacctatactggctccctctctgatggtatctcttattttgctctcctctcctcttccccctacacaaatgtcttgatcccttatgtcctcctcacccctcctcttctccacttctcattctcctagctccttctccactctcccaatgctcccaatttgctcaggagatcttgcccctttcccctttgacacaggaccatgtatcttctatttgagacctccttgtaacttctcaagtgttgtggattgtaggctggtaatcctttgctctatggctaaaatccttatatgagtaagtatataccatgcttgtctttttgtgactgtgttacctcgctcaagatggtttcttatagttccatccatttgcctgtgaatttcaagattccattgttttttcccctactgagcagtacagcattttgtaaatataccacattttctccatccattcttcagttgaaagacatctaagttgcttccatgttctggctattacaaaaatgctgctatgaacatagttgcacagatgtccttgttttctgaatgtgttatttttgtttttgtttttgtttttgttttttggaatgcctaagagtggaattactggatattgtggtagactgattcccattttcctgaagaatctccatactgatttccaaagttgctgtatgagttggcactcccaccatcagtggagaagtgttcccctctcttcacatcctctccagcataagttatcattggcattttttattttagccattctgcccagagaaagatggtatttcagagttgttttgatttgcattcccctgatggctaaggatgttgagcaccttcttatgtgtctttcagccattttagaatcctctattaagaattctctattttgttctgtacaccactttttaattggattatttgctgttttggaaacaagcttcttgagttcattgtaaattttggagatcagccatctgtcggatacagggttggtgaacattttttccccttctgtgggctgccattttgtcttgctgactctgtcctttgccttacagaagcctctcaatttcaggaggtcttacttactaattgtcaaactcagtgtctgcactataggtgtaatgttcaggaagctgtaccctgtactaatttcttcaagggtatgtcctgctttctcttctaataagtacagtgtggctggatttatgatgaggtctttcatccatttggacttaagttttgtgcatgctgataaacatacatctatctgcagtcttctacatgccagcatccaattatgccactatcatttgttgaagatacgttctttattccactgtatatctttagcttctttgtcaaaaatcagatgtttgtaagtatgagtgttagtatcagggttttccatttgatttcattggtctacctgtctatttttgtgccagtaccaagctgttttcaggagtatagctctaaaatagagcttgaacacagggatggtgatgcctcctgaagttcctttattgtactgggttgttttggatatcctgggtcttttgtgtctccatataaagttcagtattgttctttcaaggtctgtgaagaattgtgctgggattttgatggggattgcattgaatctgcagattgcttttggcaagattgccagttttactatgttgatcttacctaccccagagcatgggagatctttccattttctggtatcttctttaatttctttctttaaagactcaaagtttgctgagcattggtggtgcactccattaaccccagcactctagaggcagtggcagacagatctctgtgagtttgaggccaggctggtctccagagcaagtgccaggataggcttcaagctacaccaagaaaccctgtctccaaaaaccaaaaaaaaaaaaagaaaagaaaagaaagaaagaaagaaagaaagaaaaaaaagactcaaggttcttgctatccaggtctttcacttgtttgcttagtgttatcccccgagttattttatgtgtttgtggctattataaagggtgatgtttctctgagttctttctcagccctcttattgtctgtatacagtagggctactgatatttttgagttaatatagtatcctgccactttgttgaatgtgtttatcagctgtaggagctccctggtagagtttttcgggtcacttatatacactatcatatcatctgcaaacagtgaaagtttgacctcttcctttccaatttgtatccccttgatctccttttattgtcttattgctctagccagaacttcaaggacaatattgaagagatatggagagagtggacagccttgtcttgttcttggttttagaggactagcattgagtttctctccaacttagtttgatgttggctgttggtttacggtatattgtgtatattatgttcaggtttgatcctgttatcgctgaactctacagaacctttttcatgaaggggtgttggattttgtcaaaggctttttcagaatctagtgagatgatcatgtggtttttctttttcagtttgtttatatggtggattacattgatggattttcatatgttgaatcaaccctgtatcctcgggatgaagcctacttgatcattgtggatgatttttctgatatgttcttggattcgatttgccagtattttattgagtatttttgcatcaatgttcatgaggtatattggtctgtacttctctttcttagttgtgtctttgtgtggcttgggtaccaaggtaactatagccttgtaaaaagagtttggcaatgaaacttctgcttttattgtgtggaacaatttgaggagtattgatattagctcttgtttgaatttcttgtagaattctgtactgaagcaatctggccctgtgtttttttttgggggggggagacttttcacaactgcttctatttccttgggggttataggtctgtttaggttgattttctgttcttgattcaatttagataagtgataattgttcagaaaattgtccattttctttaaattttccaattttgtggagttcaggttttcaaagtatgacctgaagattctctggatttcctcagtgtcccttgttatatcccccttttcatttctgattttcttaatttgcctattctctctctgccttttggtttgtttataaaggtttgtctatcttcttgattttcttgaagaaccaagtcttagttacattgattctttgagttgttttctttgttttgctttaatgatttatgccctcaatttgattattccctggcatctattcctctggggtgaatttgcttccatttgttctacagctttcagttgtgatatcaactctctggtgtgactattctctagtttcctgatatgagcacttagagctatgaacttttctcttagtactgctttcaaaatgtcccataagtttgggtatgttgtgtattcatttttattgaatagtaggaagtctttaatttctttctttacttcttcattaacccaggaatcgtgcaattgcatgttgttcaatttctatgagttagtacattttctgcaatttgtgttgttcttgaattctaattttaaagcatggtggtctgataagacgcagggggttattccatttttttttgtatctgttgaggtttgctatgttaccgagtatgtggtctattttagagatggttccatgtggtgctgaaaagaagatatattgtttggatgaaatatctatagatgtctgttaatcccaattgggacataacttctgttatttcctttgtctctttgttaagtttctgtctggtggtcctgtcctatggtgagagtggagtgttgaagtctcccactatgtctgtgtgaagttttatttgtgatttgagttttaataatgtttcttttatgaacgttggtgcctttgtatttggagcatagatgtttagaattgagacatcttcctgatggatttttcctgtgaggaatgtgaaatgaccttcttcatctcttttgattgattgattttagtttgaagtctaatttgttagatactaggatagctacaccagcttgttttatgggcccatttgatttgaatatcttataccaatcctttactctgagataatgtccatctttgaagttgaggtgtttcttgtatgcagcagaaggatggattctgtctttgtattcattctgttagcctgtatctttttataggtgagttaagaccattaatattgagggaaattcaggaccattaagtgcttattcttgtttgttttttatttgttgttggtattgtatgtggatttaccctgatttttcttttggcttttggtaaagtgggattatctattacccatgttttttgagtgaagctaacttccttaggttggagtattccttccagtactttttgtagggctagattagtggatacatattgtttaaatctggttttgtagtggaatatcttgttttctttatttacaatgattgaaagctttgctgggtatagtagtctgggctggcatctgtgttctcttagagttggtagaatatctatccaggtccttctggctttcagagtttccatagagaagtccagcataattctgataggtttgcctttatatgttacttggcctttttcctttgctactattaatattctttctttattctatagaataaagtgtttcgtgtttaaattattatgtgaagaagggtctttttggtggtccactctatttgttattctgtaggttcctgtactttcactggcatgtctttctttaggttgggaaagttttcttctatgattttgttaaataagttttctacacctttgagttgggtttcaccttcttctatacctactatgcttaggtttggccttttcatagtgtcccatatttcctagatattttgtgttaaggatttgttggacttaagattatctttggttgattaatctatttcctgtagtttatcatcagtgtctgagattctgtcttccatctattgtattctgttggttatgcttgcatctgtggttcctgataatttactcatcttttctattttcagcattccctcagtttgtgttttctttattgtctccatttcagttttcaggtcttgaactgtctgaattgtttccttcagctgtttgcttgtattttttggctttccttaaagatttgatgatttcttccttttttggtttgtcatttcttccatttctctgaaggatttactcatttcctctcttaggatctctatcatctgtgtgaagttgtttttaaggttgctgtcttctgcttcatctgtgttgggatgttcaggtattgctggcatagtctctagattctggtggcatcacattggtttttctgttgttggatgtgttcttctattgttgttttcccatttcttcttccagtgggtgcaggtggtgtcaattcctttcctggtttgtatgggtccaatgttctcttccagtaagtgcaagaggggactaatactctgatgggtctcaaggtgggtagaggcgggtctgaggcactcgctctctccaggtggatggtagcaggactagcacagagatgtcagcagattcagaatttcttggtcctcagggcctgtgtcggcctgcctgcagtccccaggccaggagttctcagagtgggcaggcagaagttgggcccaaggcaggggccagaagcagctcacctctgccctgagtgggggctggagtatcccagtgatctcagcagactcagggttgcttggtcctcagggactgaatcgacctgcctgcagaccccaggccaggagttcccagagtgccctcagcttgctttcttataatacccaggcccacctgtccagggctggcacttcaaatagtgggatggaccttcctacatcaattagcagttaagaaaataggtccccacacatgaccataggttaatccaatggaaatattttctcaaatgaggttcactcttcttagggatgttgagttttattgttcaactgtccccacatttaatcttgccaaaattacctcctgttatatatgcaatctttgtaaccagctgttatgtattatctaatatattcttactctgttccatagatagatcttaataaattttcccttctttgaaaagtttttaatgtatttgttaacacgttatcagtgttgtgattaatattctaattggaagggctttataaaaatcatttatatgttaaatttgggggggatatgtacttcattcctaccaagttacatttaaatcttacagatatgtgccctgtaaagatatttattctctatataaattctctggaacttatcttttagtatggagagaaaacaattccctaagtgacagtttggttataaattttcttccccttagtcacctcccctccacttccttttttcttacttcccacttctccctcctctcccctcccttcctttcctttcctttcctttcctttctcacttttaatctttcatcttgtcatggtgataaaacaaaataagtacaggctggagagatgatacaatgtctataattatttactgtgtcggcaagctgtattatttggtctagttacaaatataggtgtgcatcttgctcacccagatgagggaaattttttcactttgttactgttgaaatgttatgtcaaattctagaagtagtttagcggcctaagtatcttttgtggctactggagaatattcggtataaattttagtattacagaaatgtttaggtagagatgctatgtgagttacttatacaggataaagcatatttaatgctacactgatgggtacacttggtattataaaggtcatgcagttttcaagttgtttggaagttctttttatttttttaactgctagttactacgactgaattattctttctttttgtgtaaaaactttataacactatatactggtctaaaatcagtacatgataattctagagaaatgggcttattaaaaatactcagttttagatacatatgatcaacttcctttcagttctgttattacattacaaaatacccttttccagtaataattttatggtctttacattttggatcatagttatttgctttaaagaggaaatatatgtaaaatgccatatgtaaaatgttatttgtaaaacacatatcatcacacaaaatgccaattcattttgtattacacataagaatgaaatattaatatgtaaatttaaagatataattgttttattttcttggatgtttttgacaatccaatagttatttaataatgaacagataagtttgactgtcatgatttggtatcacacgtgatgaactgtgtattttggcaatatgtattttcttgccatatagatgggttcattttttaaaaatatatctagatatagttcttagttatgcactatttagttaaacagcagttactaaacattttgttttctttggaaaacagtatttttgttttataacacagttgttttaaaaaaatatggggcaaattctaaattttgtcaggatgacatctttacatttcatcatcttttctttgaattctgtaaataacattctataagaaaataaggaacttgaaagtggtttaagacatctgagggagaatcatacttctctaaaatcaaatatccattctgggtttcagaaatttgttttggcaacttatgctttaacttaacttatgctttaaaaatataactgctctaaattcacagaacttttaaccactatccccattctgatatgcattgcattaaaagaaaagaaacttaaaaataacatttagtaattaagaaaattgttcctcaaagcctatttaaaaattgaccttagttaaatcagatcactgtaacctataggcaaactatagattctgagaactgcatgctttcactggtctatgtttctacttcaatatcattcactaatacttagatttttgtcttgtttggatttcctaaaataacaaacctgagatttggggatataagactatggtcaaaaaaatatgtgtagatccatgttacctcacagtgaaacatatacctttaatccagtggtcaacaacctttctaaagcttcgatactttaatatagttcctcatgttgtggagatgcccacgcataaaattattttcattgctactgcataactataattttcctactactgtgattcataatgcaaatatatctgatatgtgacaccctggaaagggttgttcgaccacccaaaatgggtcatgattcacaggttgagaagcactactttaataacttagaaaccctcagtgaatggtgcagaagtttgaagcacagatttggagcagattgcttctgtgtttgttgcttataaaaggcacaggatcctagaagtgtcactatttccatttgtgcttcaatttctaatatataaaatgggaatagagaattctcaatagcagagtctaacatggctgatagacacttaagaaagtgctcaacatccttagccatcagggaaatgaagatcaaaacaattctgagataccatcttactcctggcagaattgccaaaatcaaaaacaccaacgacagtttatactggagaggatgtggagaaaggggaacactcctccactgctgttgggagtgccaactcatacagccagtttggaaatcagtatggagattcctcaggaaaatttctcactcatcttaagtgaggtaacacagtcacaaaaagacaaacatggcatatactcactaatatgtggattttagacataaagcaaaggattgccagcctacaatccatactaccagagaagccaggaaacaaggaggaccctaagagagacatacatgttcccctagagaaggggagaggaacaagatctcctgagtaaattaggagcatggtggaggggacagggagctaggagaaagagaaggggagaggaggacatgagggagcatgaaggttgagatgggggaagaatagaggagagcaagataagagatatcataatagagggagccattataggtttaaagagaaatctggcacaaaggaaatttccagagatctataaggatgacactaactaacaatctaagcaatagtggagaggctaccttaaatgcccttctccaataatgagattgatgactaccttgtgtgccatcctagagccttcatccagtagctgatggaagcagaaacagaaacccacagctaaacactgaaccaaaatattggaatccagttgcagaaagggaggggtgatgaacaaaggggtcacggagaggctggtgaaacccacagaaactgctgacctgaacaagagggagctcctgtaccccagactgatagctgggaaatcagcataggactgatccagagcccctgaacatgaatgtcagtgaggaggcctcagcaatctatggagcctctggtagtagatcagtatttatccctagcatagaaatggactttggtaccccattccacattgaggcttactctctcagcctaaacacatgtgggatggcctaggccctgcaccaaatgatgtgacagaccttgaagatcccccatggaaggctaaaataaaaaaaatagcaatggcaatctatgctggagaggatgtggagaaaaaggaacactcctccattgctggtggttgtgtgaacttgtaagactactctgaaaatcagtattgcagttgcacagaaaaatgggaatccgtctacctcaagatccagccattcctctcttgggtatatacccaaatagtgtatgttcatacaacaaggacatatgttcaaccatgttcataacagcattgtttgtaatagccagaacctggaaaaaacctagatgcccctcaactgaattttagatagagaaaatgtggtacatttatacaatggagtactactcagcataaaaaagcaatggaatcttgaaattcccaggcaaatggatggaactagaagaaatcattctgagtgaggtaacccagtcccaaaaagacaaacatggtatgtactcactcatatatgaattttagacatagagcaaaggattaccagcctataatcctcttcaccaaagaaactaggaaacatgaaggactctaagggataaatggacccctggaatgggaagtggcatgaacccctgagctaactgggagcatgagggtaggggagagggagctgtcacaataacagcaggagaagaggagtgggagagaggaaatggaggagcagaaatattgagttgggggaagaatagagagagagcaggatgagagataccatattagagggagccactataggttcgaagagaggtctggcactagggagatttccagagacctataagaatgacacgaactgacaatccaggcaaaggtggagagggtaagctaaaagcccttccactaaattgagattgatgacttctctttatgccatcctaaagccctcttctagtggctgatggaagcagagacagacatccacagatatacactgagctgaaatcgggaatttagttgaagagagggaggaatgaagatcgaaggggtctgtaccaggttggacaaacccacagaaacagttggcctgaacaagggggagcacattgcccccagacgctgtctgggaggccagtacaggactgatccagacccctgaacatggatgtcaaaaaggaggcctctgcactccagggagcccctggtagtggattagtatttttccctggtgtaagaagggattttgagagcccatccaatgtgaagggatacatggggaaggccccaggcccagcacaggaagatttggtggactttgcagagcccccattgagggccctgccctgcctggggagtggagggtagatggggtgggaggtaggtcaggggtgggggaggagggacagggtgaggagagggagagggagaagggatttacatgtgaaacaagcttgttcccaacttgaactaataaaaaaatcaatgacccccccaaaaaaaatcaaaactgacttttaaaaaggaaattgtataaggtttcatcagaattgagcatttagaactttcctgttactggaaagttgcctagagcctgtttacagctagtattattatttcctccttagcaacaagcaataaatctcttttctatttctgagagaaagagagagagagagagagagagacagagagagagagagagagagagagagagagagagagagagagagagagaggaaatggaacttcctgcaattaacagctgtatacaccagataaaatacaaaataactagcacagggctccaacagacaaaaccacaaaggtactggaagaggttcattgcacagacacaaacactggcaaacacaatctagcacaaaccactccaaatgggccagacagcctctgttgtagcagaagtttaatggcccagctaatatccaagaaaaagcaggctggcttccatcctagaggaatgggaaagagatcacagcatttggggtcattagatttgtttgtggcagaaaaaaaatgccacaaacaaagccaaaagggaggaggaattctgtgtattagctttgccccactctcacattgatctctgagctgtgcctgcttggagaagactgaaaagaagcctaagtgagatctgagctgttcctcagtcaaatgggagggtgtgatgtgatttaggtcaagataacttcctggtatgacataagaagaatcaaatcaaatcatatagaagtagaagagaacgcatcccacacagtacaacacagtagaaatctacaaaccattgaggtctcctataaaccactgaaggtgtcattgtttcagtcctggtatggaatgagtgttctgggagagaatattcctggttttgtttagtttctggagcctctaggtggtgttttatatttatcccaaatatagagttaaatataggtgttcaatttcgtatgtaggcacaaatttcaacagggaaatttgctattgggttttcatgttagacatttgacatttaaggaaggtgtgatcctttgttaacacattttttatccacatcagttttctttgaggtagaaaactgtcttgcccggcagaacactgtcaaacattggaatctgtgctctgtaaagctgcaaaaatttgtcctgttcttaattaatctccctgaaagaaaatacgcctttgtgattatgaaatatgactgagtgattattacatccttttatgtaaaatcctatcagaccaatgctccatatttaaacagtgcaaagggtttttcccctagaagaactagggttgggggaggctagggaatgcactgtacatttcaaagtcatttttagtttcaagttagtgttttattaatcagtggaaccatctgatttgagagcattcggtattttagtttaagaaaccggtttcatagtttggctttgcaaatctttatatagtttaagtagctaaagacttattgactttacagatttaatgataccactgctgacaattctgaggcaggcacagatgacctcccaggacttcagatatccagatatccaatcccgagtgttctctctctctctctctctctctctctctctctctctctctctctctctctcagtatctctatctctatctctctctgtctctcctctctctggagcctgttgccttctctaatgtggatagacacctgattcaaggtaactgtgttttctaaactgaaaaaaaattcttttgatattgatgtaaaacaaaatgaaaatagtaaggtacaaataatcattagtgctctttcctttgcatatataactcataggaaatttcaaaaactggagcatctgttgaaaacagggacccgagtcctagtgccacactctggccacttgatgacacattcagtaactcagacccttttgatagtttttctgatgagtgtccagccattctgatcagcactgtttctttactatttcacaaggttatggctcctaatgatgttggaggatgctgcttaaagttcagattatacgtgttgatgtttcctgtgtctaatccagctggactcagatccaaaagagctgtcgcaaggggagaggggagtgacagatattgagcaatggacaaaatctaccaaacatactaaaaatgtttcccagtgtttgcttcattttaatttttttgatctcatctttgtttatgttactaatgttttcctcccttttaaactcattcctccccaaataactaagaactctggttcccactattgagtttacaggagttaacatgatttttacaatgtaattgtttaattattactgtgatttaaatcaaacaccatagttccaatcaattttgtaattttcccatttggctgactctactaaaaatcaggatttgatataatgtaaaattttctaattctagagtctgattttaaccatgtttttaaagatgttggggattgtagaatatgtcaaaacaaagtttcttttcagctttacatcactagagtttcaggaagcaacagggatgccctgtcaaagatgaaccagtttccagctccaggagttcagcttggagataagttcatactgcctgcaagtactaaaggaagcttagtctctccttactcaaatgtattttctatttatgaatatgagtgtttcactcagcagtcatgaaagaaccttttgagaagattacaactgatcctaaacctgataacattactggtttgtattcccaacaaatgtaggctgaaactttgcacattcttttacttaatgtttcctagtaataatttgtgtatgtaaaacactgacagagaaaaattttttcttcatttataaaggaaattcagagaagcttcctcctacaccatatgggaacaagtgttttcaactaaaatactcaatcttattttatatggctaataaataaaattccaaaattatttgatgctattctaaagtcaagttttattaatccaggttatcttggaatttattatgtattccaaaatgacctcaaactgattatccttctgcctcagtttccctggtttaccacacctaatttctaggatctgtctattaaaaggcaatggaaagatccagagtacaactgttcaagtgcttaaaatgttaaagattttctgactgaatatgaattaatatagtaagtcaagagtgagtaaaaatatagttcaagatctatatagaagcctatcctaagatctagggagattggtgagtggctaaaatgcttgccatgcaagcatgaagacctgagttcagatccctggcagccacagaaaacatgggcatagatatgcacctctataatccagatgcagtggaagagaaagaggcagacgcctggagctaattggatagccagcttcactaaattagtgagcttaagccaggtggtggcagtgtatgcctttagtcccagtacttgggaggcagaggcaggtggatctcagtgagtttgaagtcagactggtttacagagtgagtcccaggacagtcaggactacatagagaaagcctatctcaaaaacaaaacaaaagaaatcaaacaaacccaaacaaaacaaaacaagaaaaagagctcaaggttcaggaaagagagcttgtcatggaaataagatggagagtgactgagaaaaacacatgaacttaacctcaagattacacacacatggacagcatgtttagatataactttatgcaaatttatatgaaaatacagaagcatatggtcacatatatgaaacacacacacacacacacacacacacacacacacaatttctattaagattgtagcaggcaaaaataaaaaggcttacaaatttcagatttgataaaccacaaagtatttcttttagaaatgaagaaaaatgtgtttttatgtctgtgtttaacatacacaacttgtaccaagaaacattaagtaaagtaatatgtaaagattggagctccatttattatgactacaaaccaataatgccatcaggtttatgatcaattttaatctcaagaagttctttcatgacttataatatgacttcaatatctgtttgatgtgatatttccttctgtttgctgtgaatatgtgttgtttttattggttaataaataaagctgttttggccaatggccaggcagaatatagctaggtgggaaatccaaccaaagttatggagaaaaagaaggctgagtcatggagatgccatgagttggtggaaaagcaagatgtgaggtaacaatccataaaccacatggtaaaacacagaataataaaaatgggttaatttaattgtgagagctagtcagtaatatgcccagtcattggccaaacaattgaaattaatataaagccttagtgtggttatttgggaagtggcaagtggactaaggaacctccaactacatgagatacccaacaaagggtaccacaagttctaataggtctcaatcataaaagcccagagtcagatatagtggggaaatgccgaaagatcagaaagacaaagaagtaaaaccaccttacctactcaacttaacagctgaaaagagattgagctcctgtctcctcctgccttatcacttcctctctctgcccagatatatcatttcctgtctgtctgtacagacctccagacctctatgattaactagtggctagctccatccactgatcttcaggcaagctttatttgttagataaacatgatatcactacatctctgtcccctctagagttagatattgaaccataagccccagtgagggcctgtgggaggttccctaatacaaggacttgagtagctgttttgattttcctgattaatttcttttaacatttgaagatgcagaacaaatccactttagatactgaatctgctaattctatgttgtctcacttccctgcctctaggactcagagtatacttctgttgtttgtaaattatccactctgagttattttgttgtacaaaaccaggctatgacaactgaattttccaaacatgtgacatcaccaagtcctcggtgttctaaggcataagaacatatcagggaagcacagaaatttcatgaatttgagggaagactgatggctagattgaggcaggaataactatgtcacttaaaacactaggtgatgggaacttccctccagctctgtctcagggtgcctgacttcatattcaattgtcttattgggaatgatgggaagaccatacagaaatgtttcatttaagacatagcacttgaatcacagttccagccaacattcaactcctggcatgtgagtaaataagactttagatgcttctaactcctaacctttgactattcttgctggcctcaaaacaccacagaactgagaaaagctgacatcattgtgtcttgatgaactttatgacaagtccaaggcagatccctaattatgttgccctttaagctactgagttttacaacaattcactgtgcaacttaaaattaagacttaggaaactgtcaccactggcaagttgtgtgctgggagtgctggccaatcagaaaaataccctgggaattcatgagtatataaggattcaaataagagcaatggtgagtttgtataactgttcaagctatttatcagttgggaggatatttgtatttatccttcactaagtagagtatggatggtatggactgttcatattgaaacacatttctttcttcttctctttttcttgagccaatgagtttattggggttgctgacaggaacacaagtgaagtgttattcacactaacattcacatgggttagtgtctgacaactacataataaaaaatctactgaaagatgggtaataactaacaaaacctgtatccctggctttccattcctcacatatagaaaattctgataaagagcattctctttcatagttaccttttctcatcctccaaccaatgtgtgtgtgttgtcttcagcagtagtgacttactagttctcctatataactaatagctgtatctaaagcctttagactttgtgaggcctcagggacctctctgtaaaattcataggaagataacatagtcctgccactgacattttttttttgttcagtaacttcatggcttctgagtgtgttgctttctgccttctcaatataaaatcctgagatgctgttttcattattcttctagatgcttttgcaaagctgtatgataatcaagagtcagcatcacaaaattaaactttgaacagagagtgggaaggtcctttcatggcccactgttcttggctgcatccactaattctgctcttgtatttgtagttaaactattttctaatcataactggatttcctcttccctgctttcctgtcagttcaacagcaagtaatttaaagcatattacggattttaaaacatccatagtattctagctcttttgttattgagttttagttttataacatattactagcaaaacattaatttcagtacatagtaattgacatgtatgcctttgttttgataaatattttaataaaggaatccatgatgttgatagaattcaccagtgagcccttctaatttgtaaaaatgtctattattgatttaatttctttaatagatatatgtattgaacattttcagaaatcatactcttttagaaaatgaacttgaatagaacaaggaaaaattttcaataagtaaagttggagatcaacaaagtcaacaattctatataaaaactggcattaaagaatgtatacatatgtgtatatacagttgcatatacatacatatttatatataagttacattaaatgcaaaaccatggttcaaaaatacaaattatttatcaaaatacatttctaatgagaaagggtggtcatgctatgtgttagaatagaagaggggatatctcctctcttaggggctttttgagagagacagagagaaggggagctgacagacacacagagatagagagaggtaaattattcatgagaatgcttgtgtgagaaggcaaaaagtaagagggtctgaggactagctccaggtagaagagattcctcacacttgagatctaaaggtaccataaaacatctttttatgtaagatgaataggtcttcctggtagttttattttctcttcatgttacaagccaattaattgattacatgaagaaagtactagaactatgggaaagtagtaaacctttggggaatgacgaaaagatatgaattagggccagatacacaagtttggaggactagattgccccttcattcctttatggctggggaatttctatccccaaacacacatttctaactctctctctctctctctctctctctctctctctctctctctctctctccttctctctcccactgactatgacacatatgatagtgtttacaggcctgtagcttatttgcctttaattaagctgtaaaattggccttacaaaaactcataactatcttgtactttgagttgctttagtcaagaaagtgtcataatggcttattgttttgtctccagttcagatttgacctggagacaaattgctgcctttgcctcgaattagataagatcaaagcactctcatagaaggaagtacagagcagttttcgggaactctctgtagtttgtgcttgtctgatcccagaagaatttgggtaagtcacagtgcttcctgctcctgttagccatgcaacttctgttattaaataaccatctactctcatataaaacctcaaactgcacagaggatccagcttgcacctattactgtcttcacactgcagagtacacttcgttacttctcagcagtttttgcacgcatcacaccagtatcaagggcagattttctttctcaaaatccagttgtgtgtttccttaattgttaaagtgtaggtaatcttggggaaaatattcaaactctgtagagaggctatggattttggaaaacattttgaagcctgctgtgatttcctattcttttgtgtgtttatgaaattgagtaaaggccaatgagtgccatgcatttctcaataagtaagggattttatttatctaacttcatagttcaataatataatatgaatttgaaagtaggacaaaaataaaaaacaagatgttctttcttaaatgtctgttatttgtgaatcacaatctacctgcctagaatctggctggtagtatgaaatttaggtacaaacagacttggtgtggaaagcctcccttataccctactcctcactgaggtgactcactctaagaaggaaagctatttctgaaattcaggagctattacaacaccttcctactgtggaaaactagcatggcactgagagctaggatacagtgttccccttctgaacataatttcaggaaaagacaaatgcagacaaagccactcagactttgatggaacaaaagaataaccagattgctttgtaatcatgtcctaacataccaaagcaagcatattatccaaaccacaaaaaaagactaaataccttttcactaattatagttctggctgcactccaatctttcctactgcctagaaaataacgattaaatagcctagtcatagaattgcctctacttcctggtcataccagtcaattcagaataaaaacacagcttctttgaaatctactcaatattgctaaatgtaaattccaagtcctcaacacccatttattgtcacttattttgtgtgctccaaagctttgttatagctaggagttgatggtttccatcatgagaacaaatgtgctctgttacacttctagagatcttggactggagtgatctgatcagtctatgcgatgagctcactatgtaaggcagccatgtacaaaggacagagtcagcagcagcaacttttctaagcataggagaaagaggggtctggagagggggaacaaaacatcacccaaaacaaatttgatgagaggaattgagaattaatagttatgaatcataagaagagcctggtagttggtggctaaggaacagaagataatcacccatggatgatttctctaaccgctcattcaactagaatttacagagggtcaaatatgaacctggcatagggaacccagaatgcactgacagacacaggaatcactcgtctttccttcagtatttctatctgctaccaccccagtattatgcagtataactacagagttagaaagtatcactgtatctggtgctgttgagggtctgagaaaacatgctaaagaagaaaggatagtgatgatctccctgagtaagagactttggaataagggctgaagaatgagaactaactgagtaaagagacaggatcccacaaaatagaacaaaagaaaccacctggtaaccaggttgaccaggtcaggagtgttctgagcccaaaccaggcaaaacagtacaagaaactgtacatccatgtctgtgataaatactaaagcaaacttctcagccatgagttagtaatgtaatgaaaatagaacagtaaaatattataggccactctaaactaggatttgtcactgtattgtaagaaagagtcaacatattgaaaacagtcaacataataccccatattgacagagtgaaaaagaaatctgtttggccatgacaattagagaggaaaaggcatttatgattaattctttcttctgctaaaacctatcaacatattgaaaataagatcataactcagctgggtgctggtggtgcaagcctttaatcctatcacttgagagacagaggtagttggatttcagtgagtttgaggccagcctggactacatactgagttccaggacagggaggactgttacacagagaaaccctgtctcaaaaaaccaatccaaaccaaacaaacaaaagaacataaactcaacatgttaagggtaatatatacaaacattgtaactgtcatcacattcactagtgaaagactgaaaattctcccactaagatgaggatcaaaataggaatgactatttttgtcctgtctgagcaaaatttctagaaacaaggggaaaagcctttgaattctaaatgaagaagaatcaactactactaatgtgtattcttgtgtatatgaaaatatctgtacaggttctaaactattagaagtaatagtaaacttccaaactattagaagtaatcataaattcagttagcagcaggatgaaaagtcaacagggaaatatcaactgtgttcctgtgtactgacaaataatcaaaaaagatttggaaaataattcagtaggaaatagcataatcaacaaaacccatgtaagagtaaacctaacagaaaggaaaataagtgtgctaaaaatgacaaaatcttgctaatggaaatttaaaagaacataaatgtaagacaatatatgtcaattaactcaaactacataaaaaaacttaaacataagagatgaaccttacataaatgtgtgtgtgtgtgtgtgtgtgtgtgtgtgtgtgtgtgtgtgtgtgtgtgtgttaggaaaaataccatgagattggatttagcaataatgtctttttatgattccagataatcagaatatggaagagaaatgtaaattgtccatgttattctggaatagttggtagatattttattttgaatatcatgtattgatcgggtattagtccatccaagcatttttatatcttcatgattcaatttaggtcatgctgattatagaatttagattatcaaaaaatttggcccatgcaacttacataccatttctgcaatacttttatacccaagtcacaccattttggaagttttttttttctttttttttctgattagctattaggtttcctttacacagggactggccaatgttgcctttcatatctaagctaagttgtacttatacagatactgggcacaggtcctctctgaagtactggatcaccaatgataaagttatagatcaagaagttggtggttgggatggagacaatttagcagtttgagaaatactcaagtgataaaataacagatgagtggatacaggaatatttttgttttttgtttagtggtacagctcaaattcctaagagagtgcaaatggcataaacatgatagagagttgataaatttcattcctatcatagattactgcatataaaaagacaagaggcttgaaggaaagagattaatttcttactattaagttcataaattttgagactgagtagtggaggaaaaacagtttttaagaaccgaggcactcaatactctgaagaatggaaaaccttgacctgaaattttctgaatatattcagaaaaacaaccctgctgaggattcaaggttatgcgtgtggggttagaagagtgacacaatggacattcattcagctgtgaagtacactttggctgatgagagattaagcttctgacagagccacatagttgagggaccttcagagacagattagagttcaggaaatagggcagccttgaagacctttctttttgtagagttgatagatgaagtcctgggtttgagtaagatctctcacaggataaacttcaaatgcaatgaggcaatgaggaagaacgtagagagctgaaccttgaagctgctgatatgctcattacagatgaccgaaaagttgcctattcattcaatttggtcctgttttttttcttttcttttttccatgctgctgagctgttctgaaatgttttttatataaattcacatctagtctaatgtgggttttgaaaacatttcctaacattctatagtattacttctcactctattattatgtcctttgctgagtaaaatttcagccccatgtaatctcatttgtctattgtggtctatagttttcagatctcattttaaaggtgtggcctgtaccaatgtcctaaagcatttcttgtctcttattatttttacaaaatcaggtcttatgttcaaatcttcaattctgcatgtacttattcagtttctttgcatcatttactgacgaaatacttgcttcctttttgtgattttggtgaatctgtaaaacagcagttggtgtaagtatgtttgtgtagcttggtctctccttttatttcctatgttctgtgtatattttcttccataggtgccatgctattttgattactatcatttgtaatttattttaacaccagatcctctgatatctccacttgtgtttccttcgattgaaatcattttgggtatttgggtatattttatggttctacatgtgtctcaggattgattatcttttctccaaatctgtgaagacaggcatttgaagttatacagtgaagctctcactgagtctcagacccacaagatactcatgtctattcacattttaacagcataagttattctagtctttgaacaaaggaaacctagctatttatttggaacttattcagtttccttggacatttctgagagacaaacacatcgagaggggggaatcccacagatagtttagaaaaaaacttttaattctaaccatcagcaaattaaaagtcaaaactgtattgtaatatcacctcataggaaataggatattgattgccataaagtaaaaagtaaaaaacgctagtgaaaatgcagagaatggggaacccatccactgttggccagaataagaatgagtaacccactgtgaaaacagtaaggaggttcctcaaaaaagttgaactatgtcatagtacatcaatactactgttccccaaagggaaacggatgtcagagaacttctgcactctgtgtttagttcaccactatttacaggagccaaaacatggaatcaacataaatgtccatgaatggctgagtgaacaaagagaatgtggtgtgtatacacagcaaagcactctacagccttacaaagaagttgtgtagcactttgccctaaatgaagtaagtcatgcagatagaaagacaaattgggcatgccctggctcacatgtggaatccaaactcattgatcttgtagtagataatagagtattgtgtttgctaaaaatgggagagaaaagggaaccatgtatcaatcaaaaccaaatacaaagtaagagagaattggccttaggctttaggccaattcatatctttatttattccacacatagaaattaagagtaataaacatggcatgaagattctgggaactcacaatgcagtgggtagacaatgcagacagaaaatatttacacaccattttatataaataagctggcaaagattcagtcagctgtatgcctgaactttctagatctgatcatctttctgacaagcttcattcttacctgagaatttattatgcctaaatacaggacactgattaaaatgtatgggccaattaaagaagtagtacttgccagatttaactagcagctacccacattgtcaaatatgcaaagaggaggatcattgtcattcctagaatataattacacaatttcaataaggattgtatcagtcgtatgacaagctgattaaacaatgtgttaaagaccgggatctagagcagtcattgtacactgtagagcactcttgtgggtatgtccttgattcatgtcacagatgatggcagagcctctgtgacagggttgagactttgtagaaggatgagcgcatcaagaataaacttctccaggcaagaaaagacttaagatcattgccaacaaaaggaagagctttggtatctacaaagatgatagtgttgttgggaactgctgtagaattcatgaggaaggtacagatgggagaagctagctgtagcaaagcctttaccagtgtgttttatgctggaaagatggaacagacatagccaaagtaaccctgaaaataacataaagaataagatatgtcacactttcatatgtgggaaatgacagctaaaagccgaagaaaacttaaatgattatagcagcactgttcaggttatcttttttttttttttttttacattgcattgatgtggattttggtttattgatacaaaggtatgttcaattatgttaaatatattatatatatgtatatatattcttgtttatgtttctcagtttcttttttttattagcaagaaaattattttacatgtcaatcccatgtcccactccttgccctcctcccttgccccccccaactaaagtgttcaggttttcttaatcatatcacaataattaagttatttatcttcaccacactatatgcataggtaacagtatatttgcagattctttgtttaaactttaaaatatttattttcgtatgtttgccaacatgtgtttaagtgtccaagatatatgtcaggtacctgcttagccaataaagggaatctggtccttcctccattggagttctaggcagttttgagctaccatatggatgctgggaaccaaatcaggtcatccacaagagcaatattggtgcttaactgctgcactatcttttcagtccctgttgatgttttttaagccacaatgattaaaggagaaattataacaaacctatgtttttacgtcttgtttggctatatttgtaattccagattcaagcagttatccccaaagtcgttccaaatggtccactccaccatctggacagattgtatttatagccagtgaaaggaaagaaagtgtaatacagaaaacagaagagacgaagcctgaattgttaaggctttagtctgttttacttgaatacaacttgaataattgaccacttgggatttgctgaaactcagctactaaaaacaaggctaggatatacaccaagtttggttacacttcactagtctaaagtaatttttaacgcaaacttaatatatgcatgtatagcctgctttgcacatacacacacattactacatgtgataacttaagatacttttcattctgttttagttcattttataacactggtcatggccattagtgagcaaactctgtatttgaaagactacaatatcattatttctcaatcttcatttctgaaatgtccatgggttttctgtgacttaatgcttagcatgtgtatgtgtaatatctggggtatgcaaatttcttctgctcttgagttgatggaagtggctcatggcattacttattctttgcaatggaaccccatattgcattgagagatcatacatatattgagggaggtctcacatttgcccatcaaaatcaggtcaatggtaattttgaaaatgtacacaaacttaaaattttgagtaaaggaggttccataaaaatgtatgtttcttatagcacttatatgacttgttttcatttaaggacactcatggaaaaataccagtaatagcttataagataaattgattgataacttatactttaatttcataataatattgaaaagatatccctaaacaatcctacccagtacttaaaaggcagagggtctctactttggtgcctgtctgaactagatagttaaactctgtctcaaaacagaactaaaaacaacaagccaaaatattaagctgaactatataaaacttggaaaatatgtatactatttgtatagtttttcttactaattgtgactcatatattaaaattttaactctattctgatatcctagtgaatcttgtaacaagtccaataatatggtgttatatagaagtcaccacatttgcaaaactttccagaagtgaattttattgaaacattggcatgatagtctttagaaagtggcttatgtcaactgaaataacactgtagaaaaagtgacatcttcatatgccaaaaattaaggtaaacgttttaaaataagttttaaaaaaaaaggaaaaggaaagaaaataagcaaataaatgatggtaagatgactcagcagtttaaggtgcttactgctaagcaataagacctgaacttgctgcctgagacccacatgatggcatgaaagaagagacttcagcattttgtcttctgactaccacagggctgcatcaaggcacatgaatgtagtggcaaaagcacatgcacgtgcatgcacgagcacacacacacacacacacacacacacacacacacacacacacacacacaccacacatgtgaacacaaaatacataaatttaataggaatttttaagtaacaaaatgagaaaactttaaatagacatgagaagcaaaactgtatatccttaagatgttccactaacccacagttgtgaatcctgtctcctgtatagattgtatacctcctagggtagacctagtctgtgtggccattggggtctttgttctgacatcttatgaggtagaaacttgaacaaatattttaaaagggaccatcatttactaaatatattttatgaaaatttcaatagctaattgttttcttcatacaaaagaaaatgaagaatacactgtttggattctagctcaaaattcaaagtatttaaggagttgtacagttttgttagaggctaatatataacaattgaaccatcctgacaaatgtccatcatatgaatataaacatgagaagtcactagggggaaatgttctttgtgggaactttacaaataactcaccagcagtaccctgtagcagtactattcaaagcaaaggaaagctctagaccacttccagactgacagaaatgcaataaccaatgtcatgtgactttttattcaaacaacatgaacacattactgcatcaatgccagtgtcctgattttacttattatagggaattctgggtaaaacagtagaccaatggatgcctctgggaaatctaggggagcagagagtctgggaaaaagaaatacactttaatctaaagagggaaattaagaggaagacttatagacccaagaatgaagtaaaaagatactgggatagagcagaaacaaagaggcatccttcatagaagggagcccaatacagcatcagtcatgcaggttccttgtccagtacagactccagattcccaagtgtaacccagaggaaaaccagacagactgtcctcagaaaaagtcacagctctcaaaagcctcaattaaattgtgggttttgacaagacagtggtttctctgggagatacattaaccacagaaccctcattgagtcaccttctgaccaagaggatggcaatcaagcatcatctagagagacattctgttgtcacaatccaagctgccctagagcctgaggtcaaagatactagtctgggtacctcagccctgaatgagggaacgctcaggagggcatttgtgaagacaggagagccttccagtgatgggccaagtgtgtgggctgtaggtatggaagtacacaaagagagacaaccctgctttccctgattagaacagttcccaactgataattatgctagagtttgataaagctaagcctgaggccaacaggcataccaaattcttgaatcaagtagtcatccatcatgtacttaagttgaaccatagaattctaaattccaaaggcatacttggtattcacaaatgcatccctccaatatggtgatttatacttaggtcttgaaagtagttgctgtctccaatataccaatatacagcataactgagttactgcctacggaatcaaagtaggttgcatgtgccacacctataagaatgtaaagctaaatgtgtccatcaaaggcccctgttcccaaagaagggaaatggtctctgcaaagaaaggtctgctgaatataaacaaacagattcagcaacagctgaaaccagaggaaatacagggggccaccatttaattggccctctcactaaagaatatgactagctgtctacaatatcccagggcccagaaagaagcccctctaacatctagtcttttgaaaactagttttcccatatgattccttccccttctctcttgtttatgatgtgtttaagcaagatttttactctgaaaagttttaaatatttttagtcgttttggtaataatttttgcatttatattaatctaattttatttatttgagtcttccattagaaggaatattgttttcttactttccctgttttcttcctttcttccatttctttctttcttcccttctttctttcctatccctctgtttctctatattttatagtatcttggttttatcatattggattttaaaatacttgtttttcttattgttgattccacttattaaatatatgcactttaaaaatctttttcaatatttgcaagtctttccattccctctcatcctttagtcactgactattgtcttcttccaggtagctttcttctcctctcatttttcttcttccttcccctttttctccacctttgtacccctagacatttctcatctggttactgttctaactctgccccaaatcattttgacctacatgacagtcttcagtgattttgcaatgttcatatccatgctcatggcaaagttttagtggcttataattgactttaagtgagtttcttaactctttatgtttgatgctgtaggagctacaagaatttctttcctccaactgagtggtactaagtaataaaccttaaagaataacatgttcattaagaaagtatgtccccaaactgcagaagggatatctgaaccagcagatgagtacagggtaaacacagaaaaacaagaaacatgaaaacatttaaaagaagaaacaaagttttctaaataaaaataatcaaaataatttttcatatctaataattcaaataactatacaaattacacaaataaatgtaccatgcttgaattaccagtgggtcatccaagaaatcggaaaagtaaaagttctcacagtcaaatgaaattaaatcacagcttaccagaatctttggaaagaaattaatcattttaagaggaaagtttagagctatgagtattcatataaaaaatagagataaatttctttaacctaatggtacacctaaagatcttaatgagtcaagaaaaatctaagccttataacagacaataaggattattaaagataagaggagaagccaattaaaagggaactaaaagaacaacatattgaaacaattcgatagtcacttcattgaaaataaataagatttgacaatccctaaccaaaataatcaagttaaagaaaaatatactcaatttcatatggaaaaaacaaaacaaaacaaaactcaggagagataaaacaatggtgtacaataaaagaacttctagaagtgtgaccatccctgatttcaagctctactacagagatatagtaatgaaagcctcatggtattggcataaaaacagacaagtgaaccaatggaattgaatctaagccccatacataaacctgcactgctatggactccttattttttgcatagaagtcaaaattatacaatgtttttgttgacttcccattcactcttcattttgccaaatagctcaccatggaagcatggccacctaccagccaccaaggcactgaatttggctgtttcagaaatttagtgtggtgatcctctttagcagaattcaaatgcactcttgcttacttcaaaatgtgcatgtcctggcaaaaaatcaatttgttgaattcagttttgtttttaaaaatgtcgttcccatgattaagaacagcaatctaaagaataaatgttgttattaaaaacagaactcagttcttcttttggaagaattagaacagcaaataacccccaaaaagcaatcttgtgataatgggtgagcactttttagaatcgaggacctagatacctttcaagtggcttcccaccccctgaaatcaaatctagatctgttagcataaacacagcaattactccaatgggcaattaatcatgaaaactctctttagaaaccagaataacttttatttaatctaagaaaataacagctatttaaacattataatttttaaaggtcaaaaaaagaaaagaaggaaaattgcaggttacttacctctaaaatatttataagcaatatatgtaagattgaactataaaaacattttctctttgcaattaatgaaagaaaatatttggaggaatgatttgaccacattttcactttctgtaagtaatcccaaagcttccctgatgccaaacacacacaagcaggacccatcctaatgctgtctgtatccatgaaatacaccttactttcaaggaaagacattacctcaggataaaatgatgaaaaaaaaaacgatattccaaacacatgaaccaaagaaataaactggtgtggccattttaatatctgaatgtgccaggttatgttgattcctcattggagaccttaccctttctgaggaatgtatgggagggtgtgttgggggaggtggagggagagggaggagaagagggaggttactttggttgaaatgtaaaatgaattaaaaaaatttaaaatctgtgttctatcaaattttaaaatctaaaagaagtggataatgttcttaatagatatcacttaccaaagttaaatcaataccaggaaagcaatttaaacagacttataacccctactaaaatagaaacagtaattaaaatcataccaactaaaagaagttaagtgctagaagtttttagcacagaattctacctgactttcaaaaatgagttaatgtcaatactgcctcgaattttccacaaaattgaaacagaaggaactttgtctaattcatttccaggatgcacatttgagagtggtcagcagaaaaaaattcccagtaggtgatgagatgcacatatggaccatgaagggtagatctgagggagacaccagagtatccactccaaaatcaagaatgaaagaaagggaacaagcacaatcaagtttatagaagcaaatacattttaaaagttaaatgggcatatttgggtatacaatgtagattgaaaaggacatgctagttgaaaagaacagaaaatattaaaaataccacactttttgttgtttctgtttaacaatatgtttgtttttgacacagaatttctctggtagccttggctgtcctggaactcactctgtagaccatactaaacttgaactcatagagatccacctgcctcagcctcctgagtgttgagattaaaggcatgcattgccatggcccagttaagatattatacttttaaaccaaaaatttggggacaaaattctatgtcaacattgaataacaagaagatggaatcaaaggagacataatagaatatctaaaatttggtgttgtctactgattctggaaagtcaggtaagagttgccaataatgctgaatggctgatgtgcaaagttaacactgctgtctgattgggtgtttacactggaagataactaaataatcagagtggactatgcagacaggatctacagacataaagcatgatatgagcattatctattgacactataaacacatccatcattcttaccccttgggccttctgtttgtagtggtggtatggcaagctaagactctcatctgtgacaaagtgatgtttaagcaggagcatatgagtgacttctaagaagccttacttcttgaaatatagaacagtacatatgtagttttcatcttttttgttttaaatacagaggcaatgattgaagatgctgtagccatatggtaatgaaaaggagttataaagagaagcagaaacatatccccaatgtcacaggacttcagagtcaatgaaaacaatcacttaccattatgcattttgccaacttaaaacataaactccaaattgaaaatcatttaaactgcatttctgctatcattaatgattcccaaataacatcataactaaagcagaaaactagtgacataatctaggaaatatttcatgggaatcttaccaaatgaggaaatggcaactgggaacagaaagaccaaacatgtaaaatatggcaaggttcaatctccagggggcagagaaatgtaagagagatagattgaagactgagggaccattctgaggttccacttcacgaagagtccttttattggacaatcccctactactcatttcatttattaatcctgaagttattttaatcctcttaaccctttcaagtgttttgttcagtttcgaagcttttcattcgtattcttgtttagtaaccccacatttccactatcagtatatttcaaatgtatttttttgtaaagcctcctttcaactaagccctcaaagcagaatattcttcaaaaacaaagacaccattttctggataactttgcagcatgtgatgctacacctatattgtcagtttcactattttaactggctggagtatgtactgtgagatgctctctcttatctcaagcccccttctctggtcattgttcccattatgggctacacctttggtatatgagttgaaagatgaaatcatgtacccatcttccttctcttgcacttgcagagaccataagaagataatttccaaaacctacaattcatgggactttttatagagtgaccctgaaattcaaagtaaacagacatcttggctctgctcttcctgccacccttcctgggtcctgctctgaacttctcaactttgcctgtttatcaccagctaattaaacctcatttcatctttcaactaacttcttgacactgtggttagttaaaacctctcccctccctcccaattcttctctctagataccatacctctcactgactccactcatggggacatttccaagcttccttcttgttgtagaatccactctggccctctttcttgttccccaatttcccacccagaaccagactcctccctactcagttccttccacccctcagcttgtcttccaggcctggatgttctttcctggccattccccaacaagctcagttctgggctctgactctcttatgagaaagacagttccagtttcttaggacaatactcagctttgccaaaattctctgtctttagatgcctcctccagcttccctgctgagagagatgacatttctgagcccaagtttttcagagtagggatgaacaggtccactaaagctgatggtcagcctttgaagttgcttttcctttaagaaaaattcctccagcggcaatgtcctgtcacattgagaaggtgttaaaaatgcgttcaccccaagaggatcagatacagttaatttttgtgtatattagaattatttaacagttcaggagacagatctgatgtatgtgtctagggttttaaactagaacagatactgtgcctgacttgttctccacatgcttcctttctgaaggacttaagatttgtgtcaccttccatcccttgtcctcagccatagttcagcccacactgacagagacagagcatgccttcataggtctccaggacagtcgcagaggaggctggcaatataacaaggcctggatgagggccagagaaaggttgatgaagggaactagaaaggctccaactaacgggagcaatgctggctgactggtcctggaaacctaaggagtgacagtgggaagtcctctgaatatcatagtctggtttctgtcttatttttccttttacctgtatttgcaaaagtatggatctgggcttggaaatcttccagtcaatgaggaaacttggaaaagagatattgtcacttaaaaaaaatgtgtcttaataaaggcagaaagtgtggtgggaaacagtcaacttcctaatgagataatgtgcattttgtgaaacacatgcatacacactgatatgcacacacatgcatgtgcactcatgtatgcatatatatgcagacacatgcatgcatataccaacaaacatgtacatgcctaagacatgcatacagactcatacaaacacacatgcatacacatacatgtaaacacacacacacacacacacacacacacacacacacacacacatcaaccactccatactctgctttggaaatgctcttgagtaccattactgtacaacctataatatgcaagatatcttcagtgtcattataaagccagaggtatccacttacttacagctaagtgtacctctcatccctcatcaaagaagcttctttttcaaggagacaagagcaattaaaaaatccttaactggtcaaaatacaagaacaagagaccatgaggaacatagccacagttgatacatcagcaataaagaccctacacctaagtctcagggaacacctcagaaaggaaagctgaaagactatacgagacagaaaacaaagacatctgctgtgatatatcgtttcttgtgtttcttgtatatattacagggaagctgaacccatgaagtctcaaaaatatggttacctaaatcagatctgcacagtgataatactacttgacatcccagtgtggatgggaacaatcttgcaaggctgcaaccaatgatgaagatctattttgttttgttttgttttggagggtgggttcaaggcaagtattctccgtagctttggaagctgtcctggaactacttcttgtaccaggctggtctggaactcacagagatcctcctgcctcagcctccctagtgctataggcaactaatagctgcggagagagggaattcattcttctccagggacaaggccttctcttatcccaagcagtcaaccttaaattcatacacataagatcaacagatggatttagcaggttatatatatgttgtaacgatatatctgcctcggcacttgtagcagtgaccacaccttttgggcgtggctacaggtgctgatgtgaccagttaaagagaaagcccatgaggtccctgagaacatcgaggaggcagcactgcattcttggagcaggaatgtcgcaacagtcacttgccattttctatgtaagtacttctactgataaaacaccatcaattattctaacaagtctggttaattcattactacccgcttataatgtgtgtgtgtgtgtgtgtgtgtgtgtgtgtgtgtgtatgtataataaaaaagaagaggtgatgaattttagagggaatgactaaagggcatgggagaatctaaagtgaagaggaaggagtggaaacaataagttctcaacaaaagttaaatgtaaatttaaaaaaataggatacttgaaagattttatgttacttataaaaatattatggtttggatatttttaaagtgaatgttagtaactataaatcacaattaagcatttttccaaaccctgaaatcttgaactactaagtatagttttcaccaatatttctgtattttaatgaaaaatagacaagagatagctatacataattataacaagattaaaagaaataagagaagctgactaaaagtgatgtcacctctccatggtgacttactataaacataagtgtgagttttgcaagtcggaacttgctgagtactgaatttgggacaaggtagagagagtccagtcgatggtaatgactgcttttgctgcagagcatgaagtgtggacaaatcttcactctttcagagcagagagagatttgttctgaaaactggagatgtattgattactcagtttttctagtttcaatgcacacttgggttgtgtttattgtcctgataaatggagccaataagacagatagataaacaagtgttttcttaaatatttagaaagtgggaattatttgcatcaagataatagttcctcttccctattctctctgagaagaatatgagcatgctgaattttggcttcctggcactcatatctgatgtgggagatgaattcattgatccttgaagtgatttagttgatgaatctttcttgcagtgtggacagataaaatacatggaattatttcaacttttctgtatttgtttagatatgtgtcctaggttatggtttaacttagagaaatttccacaggttgctgcataaaatgtatgttctttttcattggatggcatattctatagatatatattaggtccagttcatgtatgatgtcatttaattctaatgctttctggtttgttgttttgttaagatgatctgtttatagtagaaagtggagtttaagttagcctactaagtttgagttaatctgaattttgaaatcagtagtatactttatataaaatttggtgcaccagagtttggcacatatttttctaggttaattgtgcctttggtaagaatgaggtgcctacataagcaaaatctgtagagtaaaagataaaattaaactaataaataaaagtaaaaaatacagtcctaatatgatttttgagataaggaatctgcaaagaagctgttgagttggttttctgttggccatctactgctgggtatgcagcctatatttaagagtcctttgttttccagtgagactccattggagaaaactaaatttacatttgaaaatggttatcaattggagaaagcttccaggttaagaatggaaacatgtgtcctctctggtacaggccctggccctggtcatgttgcttcagtctctgtgggttcatccttgtgtggattctgttgatttagacatccttgtttctttgttgtcctccatcccctctggctcttatatttttctgaatcttcttcagtaggattccctgacccctgaagggagagatttgatggagacatcccatttagggctgagtattccaaggtctcacactctgcaggtctcactgtgggtctcttcatcagtaccagtctggtacagaggaaacttctctgctggtggatgaacaaagcattgatctcctgttcagtgagttgtgtaaatgttattttcagcaatggggcctttttgctagtttgtgaaaatcaacctatagcctttgtgacacactggattatttgggggtttccatgggcctgcttttgatggggaagtgcttttgtgtatgtgtttgtcttattggactatatgaccaatgaggcagcaagttatgtgggactaggagtaggagtcaaggatgattctgggaaggttaggagaaagcttagagtcaccatgtgatctgcaggcaagagaggatgctagcagaaggtgtcctcaataaatcttataaaatatatagatttatgataattaagactgggctagcagacgagaaatcctagtaactggacaagcagcatttctacctaatataagtctctgtgtgttacttcggaccataacgtggcagcgggtagaacttgggcggcctggtggaaagcacccatgtggcatgtaggactccggcagcttggcggaaagacttattgttacaccctttgaccagcaactcatatgtaacccattccaagtattgaagtttcaactgatcatgagagatgtccagttggggtttggtctcccccattacttggcaatttcatagatgaccttcatatatgtatataatttaggaagcttctactgtattaggttttcatatgatcctcatatgacccttaattttagttgtatctttttcaggaaccccaattcattccttccctcccctccttatttggaaaatcaatttttgtaatcattcattttcgattgagaatccagttttgtggaaaattggaattttaatataactataatattttctttgctaaattttagttttgaacagattgatgttattcctttttattaattttcttatctactaaatatacatgcatattaaattactaggcctgtcctatgacaaaacataagagttggggtgacttaaaaaagcaaaacttctcccatagttctggagactgaatatctaagatcaaagtcttttggggtggtttcttctgggcccattctcttgacttgcttgtgacttccttatccctctgtcatctcatgaactttccccttgtacacatatctagtgactcataatgacatgagttttttatatcaagattcttattcaaatttcaagtgcagaatactcatactctgaggtatatggggtgggaaagtcattatacaaatttttagaggggcaacataaaattctgttcatattagatattctgttagaaatggagttgcttgtagagatatactacccagcactgtgcatttcttcaattaaatttgccaatgagcccaggttcaaaaataatcttaaaaatggatggagataaacttggatttcagtttgtgactctaaggcagtgtttgtagccttaaagggaacttagaatccagcttggaatctagagcacagctggaagaacatctggaaggtgtggccttacagacaggcccagaccagccagaacttggcagtagaagcagaggcataaatcaattcagaaacatttgagaaataagtctgaatttggtctgaaagtccaagcataagtcaacattttccttgaaagggaacaaattgttttgattgtgcttttctggaaagcctttggaaattgtttatataactcattagagactttccctatactgacatttttttccacagagcccccacatgaccatcttcgtcccttttcagcaggaagtaacctagaagatgctacgcccccgttccccattattgtgtattagggtagtgtaagcctagttaagaatgaccttcttattgtttagagttgggattggaagaaggtgttcaagttagacactttttccacatgactttaagacttagctagaatagacataggatgtatcatagcagattattgtatattcttgtattccacccttatgattgttagttttggatattttacactattaagttttaatcctctcttagactaaaaggggaattgtagggagtcaccctagccccgcccaatagtccttgggcaggtaccaggtggacctggggactcgcccataagggcggggtgaaggaaagccgggatgacgtaaaggggcttcttaagggactgcacgtggggacgggagctctctctttgttctggccgcgctggctgggttcttaacctagctctggcctgtgtttcacccggctgtgctttgaaatgaaaagaccataacccaatagaccctagtcttaaagttgaagaaacagcattggaccaaacaaagccctttgaatgagggtgccagcaaggccagggaagtctatggggacctctaacagtggagtcagtgtttatccctagagcacaatgaactttgagagcccattccctatggagggatactatggcagccaagatatgggaaggtgggcctgggccctcccccaaataatgtgacagattttgatggtctcccatggatggcctcactatcactggtgaggggtgggggtgggttgggggagtcggtggggagcatgggaggatgagaaggtgagggaatggggagattgatatgtaaataagagttcttctaaaataaattttaaaaatgtaaaaaaaaaaatctcagagttcagatgtataaaattccattactaaacatattgtttgtttcctctgtcatcctttacagtgctatttatttctatgagccactgagcaggctttgactagtctgttccattcctactcatatcctctatttctgcctaatatgagacttgttcattatccaaacaccagtctcttttcctactctttaagcttcatcactacagagaccaagcctgaagttttctatcatatatccagtatatggcattggttcagtcatatagtagatgtctaatggtctcaattaaaatcattcagcagtagatctaaccgcttaattaataaatatgcatatagaaaagtccttaatactgctagagaggactgttagtaaataatgaaattaatgagtaaatgagtgaatgtgtgagaaaaggagaaaaaagtttaggtaaaaggcagctcttaggattctggttcactggaagcatcctagatgccccttaactgaataatggatagagaaaatgtggtacatttacaaaatggagtactactcagcagaaaaaaaatggaatcttgaaatatgcaggaaaatggatggaactacaagtaaccattctgaaaaatatggtatgtactcactcatatgtgtattttaggcaaagagtaaagattaccagtctacaatccacactaccagaaaagcaagtaaacaaggaggatcctaagagagacatacatggtcccctgaagaaagagaaaggaacaaaatctcctgagcaaattgggagcatgggggaggcagaagggagctaggagaatgcgaaggggagaagaggagggatgaggaggacaggatggagccagaaggttgagtcaggggaagaatagaagaaaacaagaaaggagataccataataaagggagacattttaggtttaaagagaaatcaggcattatggaaatgtctggagatctaaaaagatgacaccaaccaacaatctaagcaacagaggagaggctaccttaaatgcccttccctgatgatgagattgatgactgatttatatgccattctatggccttcatccagcagctggtggaagtagaagcagatacccacagctaaacactgagctgaactggaatccagttgccaagaaggaggagtgataagcaaaagggtccagaccaggctggtgaaacccacagaaacagctgacctgaacaacagggagctcttggtccctagactgatagatgggaaaccagcatgggattgatccagaccccaggaacatgagtgtcagtcaggagacctcagaggtctatggggcctcctgtagtagattagtacttatctctagcataggtgtggaatttgggagcctattccacacagagggatactccctgtgccaagacacacaggggtgagtctaggccctatcccaaaggatatgaaagactgatgaccttgagtcaaaggcctcaccttccttggtgagcagaatggatatgttataggtaaggttttagttgggggctgggggtggtaggggagagggaactgggattgagagggaactggagggagggagagggaactgggattgacatgtaaaacaatcttgtttctaattcaaattaaaaaattcaaataaaaaaatctgcttattaaaaaaaagattctgtttcaaagttcacctcttcctaagtaaatcattagacatttttaaaattcattttataataccggatgcttgttttatggtatatattttatgaaactggctttttacctgtatgcttgggaacataattagaattccatgggtaattaggggattttggtaagagaatgtcattagtgaattcccaaaaacatcacaaattttcttctctgacctctgagtcctgccaacaaagaagattgaactgtagaatatgacatgggctccatcagaaacctctgtttcccagctcctacacccacctgttcccaaaagtgcctactctggcttacgaacatcttgggactcacaaatcaaaaagccaacccactttctctcagccttgaagagacttatctctgaccttggttccactcctaactcccaaacattcctgcctatgattgcatgaaggatccactgaaggtcagtcctgtaatctcaacagatactcatagaattagtatccaaagcctaggctatctagccttgcttaccagcacgttgttacattgaaactaagcaaccaaacaccataatgcattccactttgcttgtctattgccatttgttctcaccaacaaagatgaagtccttaataatattgcacatccagtatatagtagacagttctaaattcttaatttccataaatactggaaatacgtgcatgtgttagattaactttgtacactaaatgtatataaaaatttgatccctgacaaaggctaaactgtcaacatttcagagcagatctcagaactgtgagtgaagaccccaggttgttaaagttttgcattttttaattttaaagtaaagtgtgatgactaagaataaaataagaccaaactctgtaaatgtaaagccatagaggttctagtttagtcactgctattcaaggagaatcactcctgtgtaacactttatttagtaatcctaggaaatgttcatgtacttaccctagccaggcactttagacagcagaaacagcagttcatttgaatgtgattgctaattgttctacagaatacagacaaatgatggaaaaagtatatgcatatatgtgtgtgtcaataaaaatacatagcatgtgtgtttgtattacatagatattcaattgtagatacttagttattatctcacaaatgctcatgaaagctcaagatttattctacctttctcatacatgcaaatgagatgtatacttgaaaattgacaaggtgaaatttctttgttggccagtgacactaagatagctctaacaatttgcatcctttttcaattagttactcttctaggattttcatttgtccacccctatgcttttttctagcattccacatcagtgggcatcgttaaacatgatcacattccttgatattatgtctgatttgggggtgggagatttgggcactgcaaattgaagccagagttttctgctttctagacactcactctaccactgagcaatattctcagtctttctgtcagtctcaaacccaactaattgctaggcattgtggtgggctttgccatctcagagttgatgccagtagaatagttcgaaatccaatagattaagaagaggttgcagcatcattaaaaatgtagaaccaagcctggaggtggtggcacaccacgcctttaatcccaggacttgggaagcagagtcaggcagatctctgtgagttcgagaccagcctggtctacaagatctagttccaggatatcctccaaagccacagagaaaccctgtctcgaaaaacctaaaaaaaaaaaaaaaatgcagaaccaagccacctaatgtcttagtggtgcctagccagttatttataatataaagtcattcaacatgcactcagtatctaaagtatacactggaagtcatcttcagagacagtttctggatcatagagtagaagttccaaaaggctttttaaagttaaaattgccaagggctgtgatatgacgtacagaatgatacattatgagttacttttcttacgttatacatttcagtaaactttgaaaatcgagccaagctcatggcaactgttctctggaacaggaacacggccatctcctgcctagagggacaaaccaaagatgttgatttccctgctattagacaaggtggacaccaactcaatagtacaaaacaaaaagaattgtatttgtcttacagttggacattttagaaataattttctcctttcaaagaaacttaatttgctcattcttcgtagggctttctcctccaccctgtaaacacattttttagggaaagtagtttattaaaatacaatatacatgtagaaacttcatgaaacacaaagttaaagtggatgtgtttttacaatccttgtgccactggtaccccctaaggcaaccatcccttccagagtctgccttctatgcctcaagttgcaccatggttctagtcttcgtgccttatattctttgactcctctgagaaccaagcaataaacatcctgctatttctggatttcttttgtaccatattgcatttactaggtgatccttttttttcagtatttcccacattgaatgtagattaattttattcacttccaattctgcagagttctgctaggtaggcatcccacaagcagttaacttttctggtaaaatgacattgggtggaaaattctagtgggtgtctactttggaaaatgccacatgaaaagttttgcacatgttatttgatcactacatacatgcatttctgttctccagttgatctacatatcaacatttggcattttatattagtttctgttgctgcctatttgataccaaatacaagtttgttaaatatgaacatgatcagaaacatcctcaacctgttaccttaggcgaacttgaccttggcagtgttagctaatttattctttcataatgaaatgtatctgggacagagtgagatcacccacgaaggcttcaatagtggataattgcccttgctcccctgcttcctcaggaacagatgatcttagctctcagttgccatggtctcaggacaacaggttggccaaggcaatttctttttccaatttcctttggtggagatgctacaggattttttccatcagttagatccaattccactatagaactgtattttggttgccatggatttttgttgttgtagttgttgttaataatttatagctattgaataaggattgttcatttatggaggggttgttcatgtgtgtcatggctctcgtgtccttcggtattgtctttgctcatgacagttgtgagagcagaaaagcaggatgttactctattgcttcacatttctagaattcttccttggtcaaaagtgcaactctgttgaaggaattctgtgtttggggacagaaaaaagaaatccagacagaaacatgttgagatctcatcagctactttcagagcttttgtatttcctttgctctgttttactttgtgatatttcttatttcagttttgagatttactttgtgatatttcttatttcagttttgagattatactttaaatacatcattcaactctttactttcttcgatccaaaacctcccatattccccttctttctctttttcaaatctttggcatcttttatttattgtttttacatgatatatatatattatatatataatatatatatatatatatatatatatatatatatatatatatgttccaaaagtaatccagagcattaggaaggctgagaaccagagaaactactataggttagaaagtagggggtgttggctcccgcccccatgcatatgagtagaaaaaagtcatcgagaacatatttcagcgcctatatctacccctccccactccaaacaaccaacctcagtgccgattgctgattaattggtttaggcagctcaattttgttctgctttctgtctgtgactccagataacagactccaaacgagtctgccagcatgttggaatatggatctctaccaccacctgctggccaattccttatagtgccatcaaataataaattcaaaggaaaatccagtttcttcgtttccaactttccttctgttatcttctacaagctttctctccttgctaattctccactcactttgttcatttcacctttcatttaaaactatgttggctatccacacaattcatattttatacacaacactgtaaaacatcctcattggcaggaaccttgcctgtctgaatacatgctgagttgtagtgagaccttgccctaaagtgcacattaatgctggctggagaaatgtcacagtcagtaacatgctttccaagcaaacttatagaccagagtttaatcgccagaacccaagaaaaactgggtgcagctgtacacacctggaatcctgcatcaaagaggtagcgaatgattctgaggtagtaggttttgattgagttgactgtttttgaaaaactgtttggattttaattgtgatgcagaagttatagtaacaaacatttggttttgtacagacattatttccactctggtggataagctcaataaaggtcatatcccgtcccccccccaaaaaaaaataaaataaaatacaaattgttcttttaaaatgattaacttactgcatattcatacctgtatacatttacatattgaaacatataacatttttgaacaaacaccatccatttcctccccactccctctctctttgttgttttattttactttatgtatatgatcattttgcctatgtgtatctttgcacagcgcttgtgtgctacagacagtggtgagatgccatgtgggtattgggaattaaaccctgatcctctggaaaagcagtcagggctctaaacctctgagcatctctcctggaccctgttgttttttaatccccttaagtcatcgctgtatgcatggagtcagaagagctcctggaacatgagtagcctttcaggaaccatccccctgaaggaagatgatgctccctccttcttcccccaaagctcctcagataaggatgtggatttctgaacctctcccccatatatgctgggatttgtgctgtactgatattatctaagtcttctgcattgtggcagcagttacatctgctatgatttcacaatgcacctgtccagcaattatttcattacagatatccatccactcttgctctgacagtctttctgctccctgatcctttagctttggggggaggggtgagggtatgatatggatgttccatctggagctgagaactctatagtcttttattctctgtacattgtctagttgtgggtctctgttatcagtcatcacttttactgtgaacaagaaacttctctgaatggtgagagatgcaataatgtatggcttagggagaagtttatcactatgttcagttggtagaatactagtatcaggttctccaatagggcctatgagctagctagtcatggttttgggggccagttaacagtgccagacataaaaaaatctatcttatgaggagagctttaaatccaatccaaaagttgttggttactcccataacattcctgccactattgcaccagtgggcatgctttccaaaccatgtgttattcagctttcagggttcacaactgggcaataccattgattgctcatctctcctgttagcatgcacagcacctaccagcactatgaatgccaggcattagaaatgagtttccaggttgctaccagctggatttcttcacatcacatacagaaaatgtctaactggctggaaagtttggtggttttacaaatcatgagtcacagaacttgatgtcatttctataatctgctgttttcatgatgtagttttattctctctctctctctctctctctctctctctctctctctctctctctctcttctctctgtctgtctcatctcatcatggatgcaattgtagtggcatcttactccaccaacagacttgaggtaatggtctcagtgtgtggctttggtgtgcagacatgactgcttataagaaagaggaggggctccctgccccaccccttgggttatggtctcagtatcctggattgtagacctgtgcctccaggggcagaaaactgtggtggttatttaccatcattgtgtaagcactccacaaataaatatctgtcattcattatttgggccttcatggacttcctttaacctgccttcatgcgacacaacacaatttttattttctacctattaaacacctaaatagtggtttgcaattgttggataaactcaagaaagtaatctggaaccatgagagcttatttgaatctctgtgttgtgcagatgccaggcttttcacagcctacccaggcagattgtgttaagcattggtagtaaagattttaaaacacttgcaaagttttacttggttttgtcagtgtgtgtgtgtgtgtgtgtgtgtgtgtgtgtgtgtgtgtgtgtgtgtgtgtaattctatgtgtccataatggccaaaagtgttggctcccctagggctggaattacatgtgtttgtgatccactgagcttggttgctgaaagtgaaactgccatatgtgtttttaacagcagagacctctcttcagctccataaggtaatttttacttctataaatatttggtcatagtactcacatattaaaaatgaccaatcatttctaaaatattatttttctcttctgcatgaaataataaggttttcatggtgtgataagactttgctatattacccattttcccaaataagtagcttttgacaatctgtatgggtacattttgttttaacaaataattcatcaattttattttaagatatacttattgttgaagttttccaaatagaagtaattttgatcagggatgccatccaagcttaaactccttaaattatcgaggctttatacctcactatactgtacttaggtaattagagtcataatgctaactaagaaaaaaatcaatattatttgacatttaccatggccaactttaaaataaataaataaagaagaagaaaaggcatacatactaaaatggaatcatgacatttaagtgctgatgaagacattcataataactataagatattttataaacacttcatatacaaagtcaatagtggccaatataattacagcatttgtttttaatggtcttttaagactgaagataataatccatcaacaatttttgcctctagaatttgaaagataattagctgctttaattaaaggccaatgagagatttgaaacagggagcccacacagaaattaaacctatgattaattctgtgctaaagacagaaagcaccaccttgattcctatgaagagcacataaaaaggtacatcaaaagctatgccatgatgtctattgtcctttcttatgaatatattgttgttcctgtagtcccccaatttatgaagcttcagttttcttctaatttactttacaatgatgcaaaaatcagtataaattcaattacaaaatgccatactttaaagactgaattctgatctttttcctgggtggcctcatgtggtgtgatgtcctcattcaatgcagggcaatggctaagtcacagctcctgcttgaaaatgggttcatgaagaaacaggtcaccctgcacagtctccagttctatgacatggggcaggtaatacacattaaattttgagttataatagtttgtgtttaaaatggatttaatgggatataaatcaaggagcatcagtattagcaatttctcttaataaaataaggataacatatctaagttcctttccttgttgtaaatgacatttgggtttatgaatgcaaatgggctgtctatgctgaagaggtggaatgagaattacagcaatagatgagtaggcagaaagttcaggaacctgcctcatcacccatgagttaagtaagtgtgggtgatgcacatatacttttagtctcctgaattgaccaaaaagattggaccttgccaatagttgggcaagcaatgcaggagacttggtctgcatacagtttctaagcatttatctcgtctagagctctgattacaccagcctaggatcaagaaggctgctgtcactttcaccataatttctgatctactatggtccctatttagggttttaggaataacattttattaacaggtgagagtcactctcttgaaaagatttgaacatcactatgcagcttagcagtggccttcttgaagttcccagcttcactccggctattctgagtgataaaaggacacctatttcccagtgcactatgacaatgggacatgagaccacacacacacacacacatacacacacacacacacacacacacacacagagagagagagagagagagagagagagagagagagagagagagagaaccttgtctcttaagttgcttggctgcaataaacaatactctcaaaggaaatggcaaccaaactgtgatccactttttgtttctgagttagtaaaagctcctgagtccattttagagaggttagctgccaggttcaaaagtctcttctgatagtttaaccattggagagtagaagaaggtcacttcaaatgaaagcccacgccagaggctctacagagctgttttgttctgacgatttttcttgcctgtttcaagcctctggggattttgcacataatgtgttgcttggtatttctcaatcaatctctgtaaatgaaggcataagaagtgtcatgaaaatgatgcttcatatttgggtgatagtatggtcttaaaaatggcaggaagtcttttatgtgggcttatctggctcagacttgcagcccgtaagcaccacttagtgtcatatttttcatataatgctatctcactttcacagcatctccctgttacaataaatctttccgccaaagccgctcaagccccaccgccatgtgggcagtctctgccagccaccccagttctgctggccgcatggatggacaaaatactacagagacatattaggtacaaagctgcttggccaatgactaggatttctcatctcttagctcagtcttaattatcataaatctatatattttataagacttatcttatagaggatgcctttcactggcaccttctcttgcccgtggctcacatcccaccgctggaggaggcaaaggggaaaggtgacacttcctgtttctcctttcttaaacatgagtctccttgctatgtcacttcctgcctggaacaccacttctctactacatttcccagaatcctctttgactcctagtcctgcctaacttgcagccattggccaaacagcattttattcaacaatcaataagataaacatacacagaagtacattcccaatcatctcctcttttctgtctaaataaaaaggacaacttaccttttataataactgaagaaaactaaaaccataactatctgtcttcaactctatgaaagaccacagaaggatagtatataaattttagaattgacagagacatctggctacctggtcagtcaaagttcctctgtaacgttggggcatccatcttcagcctataaggccacagtgtgtctggcacacttctccattttaacaggagcccttcagtactgtcttgttttgtaagttcagcagtcattttcttgtgggtcctgcatgtccagtttattcagcaacaaacagtccaggcaagagcagtttcttgtccatatggctaatcttgccatgttgaaagcaaactccaggagtttcttcgatgcccaacctcctttctgacataattggtttgccaggagcagttttgtctcactgccaagaaaaaccctaaaccatttaaaagtcatatttctgtaggtcttttaaaggtttgaagaatacctaactatctcaaataaatctctgtatatctagaagacctaactaacctaattataagttctgactatcataggtgattatataacctgtatttaattatgcatatcattttaaaagatctgtaggaacacaatacctaaacaaaaggagacatacatatcacaaaattgaccttaaagttgtagcaataaatgaaaatctataccaatgcaaagtattcattcctatatcctattcccttttttttctttaaaaaaaattgactatgctcattatcatttataaccaaccccatttaaatgaaaaaaacatttataaagaatatttggggatttgggcgttgttccttctaaactgtttcctgctgattgggggcgatgttcacataccatggggatcatgattaaacatagattcctgaccaagtccttgtttttgtagtctgtaaggctgtatcgtctcagcttcaggggatcttgcttgatcaaaccatattagtctggaaggaatcaacagcttttcattttctatggaaacaaaagtaaaaactttttttccaagtagtctgtccttagacttaaattctgaagtcaaagtgtttttaaaatgtataagttgaattaatttagcagcatttataatcaaatgtattttagctgcagtaagtctttcctcagcaatcaaacaacttaaagacaacaatatggcatatagtatccagattctctgtgtatttttcatctttaggtggcttttctactattttacttttactttcttttgtttcttctttcccgagacagggtttctctgtggaaatccgcctgactctacttccttcagcaaatcctaccggcgtgcgccacgacaaccagatattctatttcctccttttgttttttctctcacaagcctacatatatttttaaacacagtgtaaacttttagaggtttttctttgtctggatctgtctttatcatctcagaagtgccgagtccaacgcccaagagcaccgtgatgctgcgagtatatggaagctgctccaatgcctctcagcggcccgacagggcaggctgtggaagcaggtttccctctttccctgggaaccttggggtacggggtcatcctgctcactgacaccatagcttcccttccatctcccccattattgttaatatttttggattcacctgaaaacaccagtggaaattacaaagagaggggcttggacttactaaagagtagaacaaacactgtatctaagcaacagtaaggtaggaggttcacatatctaaacatcatggagggaatgattaaggctcactgggaatcatgggacatgttttgtataccagacattccagagaagtatagactaaaatgagcatgctcctctccccactagaccattacctctatgaagtcagggttcttgcttgcttcattcatttcagtgtctctagcatttgacatagttcttgtcatagagaagacagttaattcatgttagtagctcaataaatgaagagtttgaaacaaatgattgaaaagcacatttgtattggagcttctcatggacattagttatttcagcaaaatccttgccctgacaaaattaaaagacagtaatagaaccctagaatgaaagcttgtgtggacagataattgaactatttctaagagcaatgcaaggatacctttaaacacactatttttccctagatcttcttaagattgggatgggaattaagattcagatgggtactatgtagttctttgtgatgtctagatgtattcccaaccatagatctacaaagtaaggcctccctagaagacattttgaaggatgtggcctgccatgtaaaggatcatggatgcttttggtcagtagggggagctgtcatctagcagtatctcatggtataacctctgtgaggatccatgaatcaatcatagtgtttacttctaggaagagaaatctagactctggttgccaaatatgtcattagggttataggcaattttaaattgtgccatgtgtaacacagagcctcttataatacacactgtagctttttaatacaaaattaatgccagagactaaatttgatcagttgttaagtccttagcacttatgtcatacaacatggccactgtatgtgaaaccatatctctagcctcccccaaaacatatttcgaggctggcttcgaactccagatccccctgcctctgcctccttcagcaaatcctatcagcctaatggatggtgcagcatatcttcatgtctccatggttgtttgttgctaaactttatataatgtgtggtttcaattcagcttgaaaaataatctcactatctgtagcagtacattatatatacattatatgtaatgttagtatttctgctttgaatccttgatattgcaatgcaattcctactttattaaatgtatttgatatgaaaaaaacatacttcaaaacaatcactcaaaccacaggtgttaatcctcaaaatagaggatgaattattagacatgttaattcttaggtagtttttttcccaaataattttaacaagaaaagtggaacagaagtataagccccatttaaagattactattagtcataaacttttcatgaatgttttaatgttattcctgatgagactattttatggtaagcttatcttaaatatcttagagtacatactgacaatgccttcacttattttgtttataagataaacttcaatatatttatataatatgtaattttcaagtttaacatcatattaattttgcctaacaaatcttggttaacctgactcatatcttgtaatttagcttgaaagatggtgtcttacagacagtcagacatgatattttttatttgtttacttaaaaccacaatgttctttatgtcctcatctttatgtcctttatgtcctcccttatccttggagtctaatttgacagttggttctgggtttttgtttgtttttgacagtgttggcagtatacaagctagagtcactggagagaagggagcctcactagagaaaaaatacctttataacatgagagtgatgagagtgtgggccacattgtagggcatattctttttccttttcttttttggttttttgagacaggatttctctgtgatttgactgatctggctgggtagatggatgtccccttccttcctcacccaccgctccatgtgaactcccaaagccccatgcctcaaagaggacaaacttccccgaatggaggcagagagaactaattgggaatgacatgggagtacgggcaggggtctgcattggctgttatcaactgctagttccaggccagtgtattaaaattccttctcaaaataaaataataaaaaacagagaggttaaaaataggctttggggactagagatgtgtcagtggtgaagaaccttcactgctcttccagaggactcaagtttggtccccagcaagtcatgtgatgctgtccagagccagtgtgggataggtcctaggaacttgactggggtgtgagagaatggagtacggacagaaacatgtatgcaaaagcagacgtcagttgggatgtccacattctgacggaacggtaccaactatctcaacaacctggaatctcagagagttaattgtgtacagcacacagggagggggtcaactagtctcactcaatagtagctctctgtaggcagcagttgaagtcttgtaaacattcagtagaaggaagctgcagttgctagtttttactggccttgccaacatttgcattaggatcagaggaaggatttgccaccctctgaacctcaccatgggtttgcccaattcccatggatctgaggcattggtccttgataaggccttgtccatggcaacattatacattcactaagaacttccttagctcctgacaaggttttcacagctgcctgtagccccagctccagaagatttgatacccttttctggtgtctgctgataccagcatgcatttgaacactgacacagccacaaatctttccctaacttccactaactgggatctggtcattcaaatatatgaacctttacattctcattcaagccagcacacacattcttttttgccttagaattgtcaagaagaatataaatgtggtgtgtactttagtcttcagtttattatctaagttgacataaagcataataagacagatactagtttgtacacagttgttgatcttcccccttttctctccacccaatgtacctactataaaaacaaaaaccaacaaggaaaaaccctctgattactgctgatgccaaatccattcacagaaggcacacccagaatttccaccttcaagagtcaggtcagtagtattgaaaagaactcagagaagtgtggtcacagagaagggatcaaattctaacctgaaactaaccttgcatgagagaagtgataataagtcccacgcagaggaggagaaatcagttctctagttaatgattcctcaacgtggcccaggatgttcaggctttacatatgacagatgctcatatccaccaagcagaagcagtcatgaatagtcctaggacatcacagggagccatttcatgctgtactaagttaagtattcttaaaatttgcagtacttctttggacacacctgaagatgcatttggaaggcaggcaacatcattatgttgttcactcatgtatctgctgaggtgaaaatcttttattgtttcagacttccaacatccataagaaaacataaaaggcttcagacatgggtagggaaagctgaactcacatttacagaattttatttcttgatgtttttagcgatgattattacaaaataccctggatatcacaaattactaaaaacaaaacaaaacaaaacaaaatcctccacaacatgcctttgccttgttattaacagaggagatagttgatcttgagacttaagcaaccttattgttttactggtaaaaatcaatgccaaattacttatatcaataatttctttgtaaaaataaaacaataatgtagaagatcgtaagtgggctggataagccatgcatgcctcagaaccctgttacttctttattcaccgatttcaacctggtattaaccagcttagttgccaatatttgattactaagtatataaacaagaaaacagtaaaatatagcactctgtggaatatttgtatatgtcttacttactattctgttgatgtgagtgttaggtttctgcttaaattagaaataaagaaggcacaagatgagacatgagactaaaagatatattaaccagtttattatagggcaggaaagctagtgagaaatagaagaacagaggaggacagagagtaagagagaagagagacagagttaatggttgaccaccatggttagtcgccacagagagagaagaggcagagagaaggggggaggctggaccttttaaggggaagactgtacatgtacactgagtttccacacatgtgcagagtccttacgaaggctgtaatgcatgatgggtgacattgttaagggtggggtcaaccaggtgtacatcctaacagtgaggaaacaccatgtccatggcaacccatatacaaaaacgcttagttggggctggcttacagttacaaggcatgctttgttgatatcctgcccctttctgaacagaaacaaatggggagtgttttgggtgtcatggaggggatgtgggggaaggaatcgatgtagatgagcgtggggaaactgtgctcaggatgtaaaataaaataaatgaatacgtttaattttataaagaagactaacatgttcataaatattaaagaaatacaagcaaggcagaacagtttcatcattgttagtcgctttagaacataactgatgtttccatactctttagtgacaccttaactacataagttgctttgggtgttgaagtccctagtttgcagtaaactaaagactataaatttcaaatagtacttagtcactttgtttcctgctccaggttttaaaggagaatatttgatggctcagagtttttctttctggtaacctatgctgagctctagccaacttcccattttgtttgactcatgagagggaaaaggtgactttctgagtcataaatctgacttcatatatcctggctgaaacacaaagactcaaagctcaaagcaaaattgtacacgtatattcaaagtttccctgacctcacataagggggaagcaggtagttgaggaaagattatgtgtctgaaactcacttcccctcctctttctttatagtccactttccttggggcagtttattaaaataataaagatatttgagttctcctcactgaaacccacattcctggggtctggatcagtcccatgctggtatctcagctatcagtctggggaacaagatctccctgttgttcaggtcagctgtttctgtgggttttaccagcctgatctggacccctttgctcatcactcattcttctcggcaactggattccagttcagttcagtgattagttgtgggtgtctgcttctacttccaccagctgctggatgaaggctatagtcatcaatataagacagtcatcaatctcattaacaggggagggcatttaaggtagcctctcctctgttgcttagattgtctcctgtagtagttcagtacttatccctagcataggtgtggaatttgggagcccattctacatagagggatactccctgagccaagacacacggggggtgggcctaggccctatcccaaaggatatgaaagactctgatgacaccctatggaaggcctcaccatccagggggagcagaaaagatatgtgacagataaggttttagtgggggggccaggggaggacgggtgggagaagggaactgggattgacatgtaaaacaatattgtttctaattcaaataaaaaacatctgaaaaaagctagaattaaaacataataatgtgaattcaactttggtagtattatatagcaaagataagtgtaataacactaatagagcaagaccactgattatcagacacattgttttgaatttgacttttcttttttggctgtctcaaaattttaatcctgaaaataatactttgcttagatttacttccatggaaaggatactcaagttgtgaatttgtgcctttcattttcacaggtggtaggaaaggccagtctttagaagctcactatatttcaggaatttccaaattctcatcaagttcttcctcctaggctccttttttatattctatgattacaagaaactaaaaacagtatcagccatagatacaagtttgactctctaatagtgctaaataaaaatttaagctttaaaaaaataaagatatctaaatgtttagatacttttctatgtgcagaatatataattaggaatgagtatgttctaattttctgttttatttagagagagagagagagagagagtgtgtgtgtgtgtgtgtgtgtgtgtgtgtgtgtgtgtgtgtgtgttgtgtgtgtgtgtaccatgtggcttagggtgttgtcaggagataacaatttgagggaactgtttttctccttccataaggtgggcctgagattaacctcgggtagtcaagattgatggtaagtgtgtcaccaggaatacccatttaaatagaactgggtaggtaaaaaatagtccattcactgtgaaaaaaaaatatcactcaagtttgctataagcatatctgttgattatgtgagaaaaacagcatggtctttacaggaaaataaataaacagggatgagatgaagcctgttcatgagggaactagatataaaaaatcaggaaaattcaattctggagatcttgtctttactctgacatcagtaaataatggctggattatgcgttggacacaatcaccaaatcatgaggcttaggtacatagcttttcttctcacttccatgcaatctcgtgtaggccccgtaactctctggacagctcacttagggttttgcaggtccatttcttgtttgactctcatgttctatcttccagaaaagtagtggccacagaaagtgaagaacaagcatagagctttcaatcttgcctttaggtgatgtatcccaaaggagagatgcttctgtagtccgtaatcctccagacagaggaatcgtattgtctcaacctgtttgtctggggacagagagtgtggaaaacattctatggtctgttattccatctgttcctcatctgtgaggagtccagatacagtcccctactccctcatctcaacacagcatcctcaaagcccagaatcttgatgggtctacagactaaaggagacttcatgcatgcagcaatgtcaagaagagtgctggttcacagagctgccaaatcaaagcaaatgggattagaataaagtctcacatactcctcaggtgatgtttaaggatgcatttcactgccccagtaccctatgcccttcccataatgtgtggattgaaaagattatctgtctagaatataatttttctacatagtgtactatttgtatcatttcctcaacgttgttataagtgctcaccaagagtgtattctccaactttgtcttggttgttgggttcagtgttctacagcacttacatttatttaaagaaacagttttggttattgaagagaagcaaggaaatatcaatctagcaaactagtaaattaagtgatggtaaaattatatactaacaaagctagtaatagcagattagtattgaaatatagtattaatttctctagaattgtgttgcacttccatgaatgaaaatccttatgaaagtaaaagaatgaatactacctgaaacaataatattgaagctatactaaaagtatagagaacagtttaaaagttaacattaaatgatagcatgtgcatatattgtttgagtttcatcctattcagcaattaatcatgacttacccagtcatattcttcatcatttttaatgccatgactcatcagggtggatgaattttctgagggccaattcccagaagcagaacatccagggaatgtcaagccttataaggtaatcctcagtttcctgtgagattcatagtacttcctcaagactccaagatcctgtaaatcttataaataaaattatatctttattatttaaaatgaaaatagtgcataaatttgtagctctcctcataaatagccaatatattagccttcttttgaatatttgtatttaactacataaatgagcaaaatgtcttaaaatttaaatcattctgttagatcctttgaaaattaaaataatagtataataccttaggttttttcctttattcactcgcatgtttaaatcatgtataagcagagttacaatcataaaattatgtcaaaggtaatgaaaaatagaaatgatatcacaagaagaaggaactttaatctcatagtatcctacttttggcaaaatccataggttttgcacattgtgtagtcattgggacgtcataaaatgatgtaatgtttccttcccacaggcatcagtcttaggcctttactgctggtctgctggcttgtcaggaagaagacagcctttcccacatatactggaaacagtaccttaatttgatgactaacccaagttggcctcaggtgatagagttagacatagacactctacttaagtactcatctgaattactccgtgcttggattctggaaacaaattattagggcttcattttcccactctggaaacttcttaacctagaaatgtaattctcaagactttggtgacatcagagtaaatatttatgtcacctccctatgttaaatgaaaattacatcaccagatttttaccttattgcaaaagaatccagatatatgttggtgagtgggacctatttattgtgattggtttcttcctagttactactgtgataaattgctagttctctattataccaatatgtatcaaactaatattttatctacattacaaaattcaatatatttaatattctttcattatcctgtggtcttatttgtgtttctattgctgtgacaaacaaactggcaagacaggaggttattcatttgtatagtttgtagtccataactcagggaagtcagggtaataactctgactgaaataggtaatagaggaatggtgcttattgacttcttttccatatcttgctccacctgctttctcatacaactcagtacctcctgtccagtgatgttattgcctccccatcaaaatcttgaatcaagtaaataccccacaggctttcccacaggccaaccttgtggagacatgtcctcaattgaggttctctcttcccaaatgtctctagcttatgtcaagttggcaaaataatgtccaaaacatctccaaatgcccatttatattaaactctgacttaatttaaaaatatctggtgaaataagtgcttcataattaaaatcaaacattcactctctggaaaagaactattataatttctatagctaaaacaatatgactcataaatacacaaagtaagaatgactatgagttagattaattagtgtatcagcaccacactctaaccaactgagttaactggccaactgattaattagagtatgagttatatccctagcatcataagaatatgacacaatcaaaactgaacaattaatgaggtttgaagatgattttaattaggaggttataaggcagagttttagaaaaaacgatgagctactgtgctatttcttaggaacagcatcagcaaagaagccagagagacagttgatagcaacagttatcagaaacaaagctgtaagaacagatcaccaaaaataaacattgacaccatcctgtcttccttcaagcaaactcaaaaatagatcctagatacagggaataatcaaggtagctatccaattctatcaattccccagaacagagaacaggatgaaaatgtatggaggttaactatgactcactcaagtagactacgtgagaaaacagaaaacaagagagaccttggtagttgcaaagtaagatagcaaatgagtaaagttctcctggccagtgttagataaagtgttgctccatctcttcctctttgctccacacagagtgctatcactgcagcattaagcaggattattatcattattttgatattttcatgctgcccaaatatcccagatatgactgatctcagaccattgataaaaggattttcaatacaccattggtatgggagaaagtaattctcaggggagtgtagtgtcacttgaagagtgtctaaaactttgcttgtcatctttccatgcaatgaagaatggtgtctattgtcagtaatgtgactgagtggctttataacagctttgtcacaacagcccaggtgtgcatattttccaattccatgctcagcaattgctgatgacatggaattgtaaatgatggaaaatataaacaaggactttctttgcccaggaaactggttgtgaaatactaccagcacagtagcaggtctgccatggtcatccgtttccaatggtttcatcatggcttaatttttctgtattctccttgtggataattctataatatcttgtttgttaacaagctcaaaccctttgaagcttgtagaacaaagctattattaggaagagtaagaataacatccctcagccttttccacagatggacaactggaatcttaagacatatggaggtggcattagtctcctttgttccccagaaatcatatcataatcaagccagcacatccctgataagacagtcttctcctaaagtactattatattaaatatttatctttattgcttttctgtcctaaaggattttaaatatcaatccattcatatagtcagcaattgattattcctgtgtgaatgctttaaaaatcaaagtatagaactggatatagattctttcctgaagatccctgaagactacatagagggacaaagcaggtacctaaataatgaaaccagaagttagaagtggtaaggactcttttcaggatcaccatggagacaaaaggtaggaggagtctttagtctaaagaattataaggagttgtgtgtaggagaggagtatggatagttaaaaaaatatggcacaaaatctataaattcggatatagggcttataaagaagtgtaagaggaggaactaaaattaaaaagaggaaacagatatagatgcagctaatggtggatcttgaatacttaacatgtgaactaattgaaggttttgatcaacagtataaatggaccagagttactcatttagtctattaaatttggtgacatgagttttaagaaaagaagcattgcattaatgaagggaagatgataggttcttaaaagtctgaaagggttaaacgggtgagatttcaaactacataaagcacaatttagagattgagtgttttgaatgagaaatgttccttacaggctcttgtatttgaagtttgccttgtagtaggtggtgctgtttggggaggctaaggaacccatagggcacaggaccatgatggatgaaaacatcactgaggttgacctctgagaacataaagtcctccccactaccaattctctcactgattcctatgtgcttttggccatgataactttcagcttcctgtctgtactgtcatgctacacctaccattatgaatgctaaagaaaaatacatgtttttcttaagatacctctggtcatggtatttatcacaacaacaggaaaccaacttacacaatagggctcttgccaatcatagagattcacatttatttatcatttactaagttaaaaaattctgttaggaagttacaacaagcttatggggcaatgtggaaaaaataaagttggtcattctgctcagagagataaaatactcagtgtctttgatacaaaactgactttttctgtaaaaagtcagattgtttgaaaaaatcacagagtgaaaaagaaactatttatgagctgattaataaattttctaaatgggcatagtattaaaatgagtcctgatgacctattgttatactaatagatgagagaatttctcaaccctcatcagagaagcttcttcttcagtagatgacaacagagagaccttgccaatgtggtcaatgtgcagagaataaaagaatgtgaatttgttagccctggatgcgacatatatatcatatccctcacgggtattcaagtggatggaaaagttttaaaagccaaaaatggtcagtcagtcaataacatcaaggaaaaagttttccacacacaacagggcagttgcacatatgaatttacagatgctgtgacaatttgtacaagatgtgtgcaagcttcatctagacaaatgccagcatttaggagaaggtgggcccagagatgtctaatctcaccactagataaggagatattgcttttatcagctcatgggcaaaggagactccattttctttagcccttggtaagtcatccatacaccagcaaagtctctcctcccaagagtaactcagcaacagggacagttctccatgagaaagaaactgacagaaaggaagaaagaaagaaaggaagaaaggaaagaaagaaagaaagaaagaaagaaagaaagaaagaaagaaagaaagaaggaaggaaggaaggaaggaagaaaggaagaaatctcaaagttagatggaatgggatgggagggtggagagtacaggtatgggaggagttgggaggccgcaaatatgtccaaaatacaatgcatgagattctcagaggattgataaagctagttagtaaacaatagaaactgcagccttatcctctctgtcaaaaaacaatattttatgaagtgaactagtcaaatgatttttaaacaaatgtaggttatagtttaagtttaagaaatcactattagtagggctgaggtgatggctcttaggaagaaagaaagccaagtcctggaacttcacaccatcttacgccaaaaaggcagagagggtaacattcctggatcttattggctagccagtcttgctgagtaatcaagctctaagtttagtgggagaccctactcaaaaaagtcaggtagagtgactgaagaagacacacaaatccttcatgtcaggtctccacatatgtatggatcatatgaataacacacatgaatatgtatacacatgtacagatacatggagaaaaaatatttcctaatttttggagttgatacaaatgatggattctaaagtaaaatggtttgatgtgataaatggactttctcatctttatgagtaatgtcaagatggacagagactagagctgtagcttataataaaaaatgggacatgctttcaatacttggcaggctgaggtagggcaattaccaggagtgtggggccagcatggactatgcagtgagttccaaaccagtgtgagctacagtgtaaaacctgtctcaacaaaataaattaaaagcactaacaatgacaacaaagttaaacaaaataaatatgaatagtatgtgttctaattatgttctggttagtcaggtgtacaaagcaatttagagtgaaatatataaataaagataatgctgagtttgatttttgcctgtagacaggaaactatgctgtttattgcttcattgtcctaattatgatttctcacaccctcttaatgatttgtttttggtttttgttgtttgtttgggttttttgtttgtttgttttttgagatagagtttctctgtgtagctttggagcctatcctagcacttgctctgttgaccaggctggccttgaactcacagggatctgcctacctctacctcctgagtgctggcatttaagacatgtgccaccactgcctgggccctcttaatgaaaaccaatatgaatcttaaggaaaggtatcttcatgtataataatagtctttcatgtatacataggttatgtctatcctatttcatttctactttataggttaaaatatcctgacatttagtaggttaaataatctaagtttatacaacaaatagaagaatcttaactttaagattattgctgacttatcttttacttataaatgtcacaccaatgaggacatcaccacaatgaaaataggaataggaactgttgttcaatacatagatactaaggggcacaacagctattgactatttagatgaatggggcctaagagtatgatcttgagtcactatcttcagtgactggactccactgattgtcaggagtcactctgctaaactatgacaaggagcaacaatgaagcctttaggtcagagcagactaggaggctactacacatgaaaatacaaataagttaagtgaggtgacattataatttatgttgactcatgggttcacaccttgtttgctgtattgtgtcattgtccaattatgtaaacaatcagacaaagttgtttcttctttcaaagaatgaatctataatttaatgcatatcttcctgcatatgttcatgggaggtgagtggagtctgtaagttaatatttcgtgttctgatccagtttccaagcttagaacactgagtgttgttttataaagagagttaactatttttgacaccatcaaatgaggttctgtttctaacagcattataagttaactaatattggggcttagtaggatctttgagaaattagcatcagaattttccatattgaacaaaattccacataagttttatttagatatttactctgcatctgaaaggctattgaattgtgtatgaagtattttctatcctctgatatgagcccttcctcaagtagaccttgtatgcacataagccattgacccttttacaggaatgttttcatataaatcacatttaaaaactcagtttatacaacaatagtgtcaatgactttatcttcattcttatatctaacagaacaacaacaaaagcccagccacctgaatttataaatttttatactaagtctcactaatttggaaaaataaaaattgtcttcgtatctcatttttcatttttgtttgttttctaaaaacagacctgtcttcacgtttcattttttaaaatatcaaggactaccttaccattgtgaagttttcaatagcatatgatgaggatatttggtatagtaatttgtgaattaaagatcaatgctaaacttttcttgcagacaatggatatatcagatcataatctcaggtaaagatacagttgtacagacatctaagtagtgactacgatcaaaataaccctacacagcatatcatttcagtgaaatgtcatatgtactatggtattattagcctttcattgagaaaaagaattcttgtgttttgatggaagtttctgtcccacccagtcccacagccccttattcccaaatgaacacatagaggcatatattaattataaactgttttgctgatggctcaggcttcttttcttgactagcccactcttaattattaacctgtaactattatcctatgtatttccatgtggtcttctcttacaaatgatgcctggacctcctgctttctcggcagctacttgggatctccttgagtctcaatccctgcattcctttttcccagcattctcctagtctggtagctctgcctatactttctgcctggctgtatcctgcctgtccactgaccaaaacagcttaattcatcaaacagtaagagaaacatatgtgtcatagcatacagaaggacatcccccatcatctgtgatttatgtggtcagcctatttgttccaatagcaggtaatccacaaatgtggctataaattttatgtttatgactatcattaattccttgtgtatccagataaagtaacagaatttaacattaacgaactaggcatcatgccatcacagaagcacaagaaagcagagaaatctatgcagacataaagccagaaattagatgcatgtaaaagcagaggattgcaaaagccagccaacaagtaatcaaggtatgagacaggagacagagtcaccttcacagctcagagagagaaaacccagtcaactccttggttgggaacttccagacaccagaattgtgattatttacatttttgtgctttataacatcacatttgtttttcttctttaatgtaatgttaagaaaactgatgtgagacccaaataaaatgggtcatttccaaatggtcctgggaagcataatccttaaggaatgatcatagaatcagatcattttcagcctgatagcaatttatttccacttttagagaaagattaactcttagacatatccttcaatggtttagagagatgattcagtggttaaaaacttttgtttttcttgcagaggacccagatttggttttcagagacacaaggtgtcttataactacctgtaattccatttataggagatttggtgccatttgctgctgtgacaaattacctttaaaaatacttcaaggaagcaaggaatggagagtttattttggcttacatggtgggaatatcatggtggtaggaacttgagtggctgctcacattgcatccacagtcaagaaacagagaacaacgattctaggtgcccttcattctttttttgatacagcccatctgcaaaatctctcactgatatttgcagaggcttgtctcctgtctagctgagagttgacattacctgtcattgtggccttgtaacgatgggccaagcctttctcagatgtgcttggttgttgctaaatgttggtattttgcaggagaaggaaattgacacatggagcagtttgtcaatagtcaagtgggtgatggtttaaaaattagagggcttcaagatagcatttagagaaatctatagtaaaaagaaaaaaagatagattgaattcaaaatgaaatggtaggatttattctaaaaattgtacaagtatatgagagcttaatgtcattatgacaatgtcctttgttgctcaatgaatagaactctaaaagggaataagtgggatactaagactgaatgagaatcatgtgtatccttgcttaagaaggtgagtccactgtccttttctgaactcctgggcctacaggaggagcctgctctttcttggtacaagagcaacattccttgacctgacaactgtgctatagcttcaactcaggtggaggacctggaatatggtatctatcctctttaatacctgaccttgattcctccactatccatccaccttttggctctgtaactagggtaaagacttggcatagatcagtgaagtaaaaaatgggattactcaccaaagcaacctcaaggcataattaatgagcagcagggatcttaagcgcatgccagagagtagatcttgataatgttagacaggagcagtggttcagaatggtgagagatgaatgtgataagttggcctttgtcactaaggaatccttatcccatgactgaaagctttctggcaagggcacagggaatagttctaatattctgtttggatggttaccataaacttggggccaggaaataagaaactccacattaaattaagtagaaatgacagaactgctgtggcagagttttgagtaaaaaagttcaaaagactcagagaagccagcagcacgctggagttatttggttgtgtaacaccagatgacttattaactagagggatttgagatcacttgtagctctaaactgactaggattgcaccggataggggagtggtatttctgaggaccagggccaaggcctcagaagggtataaatgtatacagtagagatttcatccatagaattttacatatttcatgtaagtttacgtttaaaattaagttcagcaactacattcaatacattatagtttatttacttattttttgcaaattttgctttttaactctggagtttggggaatattatttctatatgagtgatattctgtttagctttcaaaaacagcttctcaggttagccccaactctggatagtcactcttcctccacacagctttcttgcttttctactgccatgttgtgtgtggttgttttaattatgtgtggaaaagtcagtttccccaaatagtttgaggcctttgcaaataaaatcattatcttatgcctcagaatttattatggggttttatgctgaacaaattatttgctagaattttccatctattattttaatatttccatttatttagcacagcatacctgtttatcactaataatcagaatgtaaacattgcatcactcatgcattatctccttaattggctgaatcactttaaatccttgagataagcttaagtagataggagatttaatatggaatgataatttgtgaagtgtaaacacacataataaagtaagttgtttgctttgcagcctgaaaattaagttatcaacttcagataaatgaaaagacaaactagtcacagcaataaaatacactctcttaaaaatttaggctcctttgcagcaattttgtcatatagttcttcacaatgtctaaaattatactgttatcatcccaggatccttccatgactcaccacatggaaatgggaaatatgacatatttcataaggacattatcaacttgtcttagcctgacgagaatctaaagactgttgagactgtgtagcagaaaacagaatttattgcagaagtgaaaatgctgtcattctcatgagcaaagttagatggaacaaagtgtgtgtgtgtgtgtgtgtgtgtgtgtgtgtgtgtgtgtgtgtgtgtgtttattcatcacacatatgtagaattttcaagaataaaaacttgtatgtaaataatcaaagtgaatatgctgttagtaaggtatctttaatttttgagtgttttaaacaaaaattttatttgaagattaatatcatgccttcaaaggaatgcttacctctagttccttgattaaaatcaggccattcccctccttgactagccctgacttcctgtttcctccaacatttgcaatcactctgaggttggaacagagccaccgacttcactttccctctgaagtgcaattcttggtctgattatgaaacccttactaaatgttcagtgctgcattttaattttatgtgctttgtaattctagtgtgctgagaacaaagaaaacagtgcttttgctttaagatttgcctgctcctgaagctcagagtcttatagcataattatatctatagtaaccacacaggaagtgccttgccttgacagttttgactcagaataaacagtcatgggtctctgtagctcttccagtccccagtgttacacatctcagtacagaatcccaaactgttttctttcttgacttctgagtcttagcattgacattttggttcttgcagtgtctttggtaattttttttgtgaaatttttgttttaatttcagtctgctttcataaggataggccttcattcctgttttgtcacatagattattggccctctgtatattaagcttcagtatctatagttttgaccaaatgtgaatcaaaaaacattcagtaaaagaaaatggaatgtgtactgaacatgtagaaattcatttcttattattattccctgagaaatgtatcacacaacactgattcgtgtagcattcaagttcaacgatatgttgtaactaatccagaagatgtatgaggtgggtgttaggattcaggcatctgtattgctctgcccctgggatcctgataggttatgctctcagctgctgccactaagagcactatctgtgcctattcactatgttccctttgaaaagggccctgcccacctcccattctcttcctcttctctctctctttctgctcctctctctttctttcactctctctttctctttctctctctctctctctctctctctctctctctctctctctctctctctctctctctctcttcctccctttctctgctcctctttcttctctcctgctactcctgtccccagaggttggtctccccacttctccctccccttccccctttttatgatcactttctctaattaaaaaaaaaaaaacctctttttgaaccctgttgcatggcactgcttttcttaaattacaacagtgatgagggggaggcagtttgcgcctgcttgacagacatagatacaagaattgaggatttttggatagtgttgtcggtagggggtcctagaaacaattcctcatagataccaaggatgactgcagttttctgtcaataaaatactttgtattttccatgtttggtgtgtagcttataagaaaatttagagatgagataagaaataattcactagttttttttctgtttatctgtttattaaagtgccatctaatctgctttcatgaagggcaaagctcttataaggggaattcgatcatatctcaaacctttatttctttttggatttttaaaaacacagaaagaagttcagagaaccctcccaatcaatttcatcctcaaataccttcatgctcatcattcgaagtacaaatggatgaaataagtatgtatggatgtatgtgtgtgctgaaaaaaatagagtgtggctttttggtgaatattctttttgctttgttctatttttgtttttgtctaatgccttgaattggagtgtaatttaaaaaatacttcatggttcagtattttattgtgctggacttaaagcaatgttagtttcttgctcaatgagtctattcctgcctataaaagaacaaaatgcaggcatggtaacctctttgcttaaaactcttcgaacaattcatgaaagcaatacagtgccaataaacagaatatccataatgagcatttgtgattcatttggacacagcacctcaacctgaagtgttattttcttaagctatccaagacagtgacaacaactatttttctgtttgcgttgcctgtgatgtagatgtgactgtgctgatgattatggacacaccctgatgagacaatggcagcaagacccaccttctgtacaccagaaaacattccacttccttcccacaaaagcagtccttggtgttcatgacgctcaaggtagctgtccataaagctatgacagaatgtactttcagactggaactccctacatttcctcacatgccccactatatactcagagaccagtcacctcactagtgttggggtgcatgaattgtgtcacaatacaggtttcctaaaacactttccattaataattggaattgtgctgagatatcagccagtgactgcagttaggaagaacagggaatctacaaaaagatttttaaatttcacatcatttgaaaatgatgaatgcaaagaaaatgttattcttgtttctatatctcatactaacttttgagggagaaatatggtgcttactatttttaaaacacaattcctaaagtttcaaaagcaaaatctatttaaaatgattttgaagctatcatttttaatctaatattatcttgggaaagatggaaattattttttgttgttttcagcaattaggaatgtcttaagatgaaattcttggaaatgccccaaaacaatattactattgtccttgatataaccatagaatttcataccaaaggattttataaatttctagaaaggaataaaacactgatttcaatcaatagtgtcattacttaaatatatgttcagcacacagtgtcaggctgcttatttagaaggtcattgcatttgactttgctctaaaacatgagattcaagtcaactataatacctctctagctcacttaattcatgattcagtatttttcttgttcgtctgttttgaagatgatacaataggatttatattacatttgcagaaaacagcaatgattatgtatgaccgttttctgggatttttaaactccttgaaaccacacacacataaagcaagttgtctatatagtcagcagatttattttttctaaggaactctaagcaaattggaatcaaagcatttattcagagttggtgacttctatgaatacaatcaaagaataatgaatgagaatattttacataagaactgaaatatgaaaagaatgaaaggacttctgaaattaatttttaagaggtatatttaaaaatgacagaagtcaaggacaatcttgatagagaattttcctccagtggacaaaagtaggtgtgctcaaggtcacctgtgtttctttcattgtaggaacacagaaaagaacacagtgttgatatttcatcattgccattgctttgtttcaactatcaggcatgaaaaattacagagcagaaaagtttccaaaaaagaaaagaaacgtttgaaaactatgaacacattatgagtgtttaatgcagaagagctggtttatcaagaactgtagaggaaactgaacaactaagaaacacactgttgagattttcacaccctcctagagaggggatcaaagtgcatgcctgtggtttcatggattatgagcatgggtttgtaggtataggagtgtccatgagttatttgccagcattagaaggtagttgtgctaggtttatagtcactaaagttcttttatttgggcccaattattttgtttcatacatagcagttttcaagataatgtgccttcaagtatctcagcttcagttggcaacatggtaaaaaaaaaaaaaatgctgtattcaaaattagaactggatgccagttatggcattcttgattgctagtcattgattcagctttgcttttttattttttattattttactttaacttctgtaattactactcatatttgcatatccatcaacccattcctttgccctcccatcctcccatgttccccatcaacccccccaacccatccctcaattcctccccagggatattgaggccctccaccagggacctccaaagtctgtcatatcatttgtgggaggacctaggctctccttgctgtatctggacagtgatagtatcccttcagaaggaatgggctcccaaagtctgtttgtgctctagggctaaagactggcttcactgttagaggtcccatagactgtcttggcctcctagctggcactcacattcagagggcttggttcggtccaatgctggttccccagctttatgactagggtctccatgatctcactaggtcaggtcaactgtttctgagagtttctgcagcatcatcttggctcctttgcttaaccatcctccctctccacaattggattccaggggtatggttcagtgcttagttgtgtgtgcctgtttctgcttcgaacagctactggatgaaggctctaggaatggtaaccaaagtagacatcagtctcatcataggggaagggcatcaatggcattttctctgccattgcttggattcttagttggggtcagtacaggtatggagagaagtctggcacaggggaaatgttaggggatccacagggatgaccccaactaagaatcagcattgattttgagatgtgcatagcagttctggttgatatcctgccttccctaattgtataattgtgaggatgaaataaacatgttagagattttataagaaagtgtgtgtacaacagattgaatacctctcttctgactaatgttacagtggaaattttctttagcttcaatttaaaagacattatagtcatgtgcttgaggaggaaatgctaggccctcagctatgaccctgtccttagtgtgactgcatagcagcagctcaagagtcaagtggtcagaagatacattcccaaatgatcatcgaaaaccttcaccactacagtgacagaaatcttggcacaaaaacactatttatctatacccttaaataagcatatatttctatgtgcacatgttttattcaaaaagtaaataattttaaatattccttttttgagatctcttataaatgtagtgaattattccaggagaacaatttcaatattctattttgtttgaatagatgccatgattaggcttacattctgaatcaatatttgcatccccattcttgaagttacttatacagtattgctcagcaaagtgccaatgaatcacccatgtacaaatcaatgaaaataacatctgggttagccatgttcctgtgatggagatttaatgagatgtctactactccagaatacttacattgctttcaatgaaatgtttctaaatgtcatttggtcaaacatattaagaaattgaggaattgctgtctaaaggccttggtgtagagtgaatatcaaatgcatacatgtatattcacttctacatgttcatcttctctacagaaagacagatccaattcaattttataatgtatatgaccaaatcttatcccatggggtaaatatgtatctattctgaagagtgtgtcatgtagagtgtgagagttgtccatagcctggcatttacaggaacaggctgggcttacttagtcttcacttgcccttttagagaagttcatccttgcctgtgggatctcagtatgtgtcagtacacactagagggtgggatctgctgagtttctgtcttgaaccacaaagaatgcagctagtcaactaaatacaaacactaagacattatttctttgctgcctgcccatctgggcacaatgccatgtaaggactggctttagagttaaggtgtcatgaatacaggaagattgttgattgatgggaaacgtaggcagagaagtgaagaaacaaagagagataattcaagtttctagggcacttgggcttcactaactgatttcaaatagctttgcactgaccccaagtaaatatttattcaggatcctgtccaggtcaggtaggtattaacagtggtgcctttgtctttaatcacttagttcctcacctgtccttctatcttcaatcagctttgtcttttaattatactcagagctatttattttttcttttaatgatctcattctacatcccatttgcacactactaacattgttgtttaaataacatgtctacagcatgttattaacctagaaaaacattttcatcattgacatcagattattaacagcaagggatttaaatttcagatagaaataatgagggggagaatgctagaatgcagaaaccaaaactccaatgggtggaacagataaaacttttccatatctgttgctcaatcacggaatttagattatattatgggactgctcagtatcagctccaacagtcatggatgatgtcctttcaggaaacatcagcttcctattagtggaaggtaaaccagatagacctgtctatttattcctactgacatcatgtcaagtgagctcattgtaagagacatgtcttcattcactgaacatttaataagcattcatcttttattgtgtatttttagggatggtttcatgttgttctctcaatgagattaacctccacatcaactttctaaatagctgtgctaagtaataattttctctgtattacaaataatcttatcttctttaaggccaaacctaccagctggttctactgaattcaaaccatagtacattttaggtgcatgtattgtttccattacctgccattatctatacaatagcagccaaaaacttgtttgtaattttattcttatttttttcaaacaggagatgtttgaaatacatgagatacaagaataagaatgttggctgccatgttttctgttgtaacagcaataactggtctgataaatacacagtaagaggaaaataaagaaactctatccacattctaatttctggtctcaaaatagttttaggggggctatctaaaccttgagtcatgaatgatacaatagaacattttccctatgattatgtattgcaatagtatcttcatattacagagaggtataatctgctaaaactgttaccttctggttgtaataatgccctcatttcttccaggaagttgctgaggtctatcttcaagatctttggtctctcttggaatcacttacctaccttcttcattatttattattggtcagtccattgtggcatctcaataaataatagtggttaattcttcccatccatgtgctcctagcccatcacatatggtgtgagaagtctggccatggatgttgtattgttgaaagacaatactgctagatttaggtgacttaccttttgatcaatctcctctatgcttctttgtctattgttcttatagggtgagatatcatttgtcattttgaattttatttttgtacactatattgatactgttttgatttttcttattttgagacaagggcctccttatgtagctctggctggcatggaattcactatgtggactaggctggcttcaaactgacagagatgctgctgcctctgcttccaagttctgggattaagagtgtgtgctaatatgctccatgacaatagctcttctgaaggcattcttattctttctaaagtcctttcctggacaatccaggatgttcatacaatgactacaagggacaaggaactggatttggatgctcaaaaaagtctaattgtcattagctttatgatacaaattttctttgaaaattgaacatttgggtatgaataggaatgagttctaaacagaataggtttggtggggaagaaagacaataaaaaacagactgcaaagtctatgtaatgattctgtatccaagatccaatgaactacatcctttcaacaaaaacatcttcctgtagatttgcaagtggtctggagaggacttatgttttagctaagtcttaaataggaaaagggtttcagctgaggaagattcacgccaggcagtgccctgcctaggaatcatccaaaagtttttttctgggccttgtaagacacaaggacacaaggaatactgtgtctcaatagctggggtgactgctgtcttatattaaacactctagcttcttcaagatgtaagtatttacacaatttgggagtgacctcccttggggaaaatggtttatcaactcttccttaaggggaaacttgaaaaatgtacaactctctctctctctctctctctctctctctctctctctctctctctctctgtgtgtgtgtgtgtgtgtgtgtgtgtgtgtgtgtgtgtgtgtgtgtgtgtggtgtgtttaagagttcaaacagaactattcaatcttccacaaatatccctccaaatatccctccaactttcctacctctgagcaaattttaaagctgtgactcatgaaacttcagttagacatccaagttttgtagctctgtagagcaagattgctcacaaaatggatccctcactgaatttctcagaaagctttctttatgtgagagtccttcattaaataataacttttttctccattgtcttatttgaattagaaacaagattgttttacatgtcaatcccagttccctttccctcccctcctcccctgcccacccacaactaaaacactacctatcacataccctttcttctacccagggagggcgaggccatccataagggatcttcaggtctgacatatcctttggaatagggcctaggcctaccccctgtgtgtctaggctgagggagtatccctctatgtgaaatgggctcccaaagtccattcctatgctagggataagtactgatctactataagaggcccgatagatttctgaggtctcctcactgacacccacgttcatgggggtctggatcagtcccatgctgttttcccagctatcagtctggggacaaagatgacacccaactaacaatctaagcaatagaggagaggctaccttaaatgcaatcccctgataatgagattgatttctaacttatatgccatcttatagccttcatccagcagctggtggaagtagaagcagacacccacagctaaacactaaactgaactgaactggaatccagttgccaagaaggaggagtgatgagcaaaggggtccagaccaggctggtgaaacccacagaaacagctgacctgaataataactctttgcaacaaagtacttctatttcaacaaaatttagtctacagaattttatttaaagaatatatcttaaattaatcttggttcacttgaacagcatgtaactgtaacttagatgtttcagtttaaagaaagttcaggagaccttgagatttaagaagtacatgaagcagtttttctgatctgaatttcatttccatattgcaaatatcaaatgctgtaaagagtatttgcccaacccatcatttctaatcccagagagttttctgtgttccctctttacccagttaagcctttactctctttactcttcgcatcctctgagcaaacctccctgtgtccacggcaaataagccctggccccaggcagctgacttcttgttcacccagatggaaattaatcttcagtgtgcatacgcaagcacctgccaccacctgttaaaaatgcaaaccctggactaggagtcaggtagagcttcagatggggaggggcctctccagcagcctaagatgctttaaatctcaggatggcctcctgtaaacccacaagctgaatttgaatttttcagtgttgttttgaccctggctatcacaggtggaatttagaattgttccccttttcacattttgcttattttaagcctctccaaaaagattcctgtttatgtatcagatttagagagaatgttagaatttgcatatttggctttgagcttaacaatgatcatatttatgaagagaatgttaagtcctccccctctcctatgttatattttgatgctcatttctggcagtctcaagccctttcatatttgtatggatatacaaaaaccataaacacccaaaaagttaagtgagtgaattttatgtactagttggttacacagaagttacctctaatatttctgtgatattgtgatgacactatgagatattctgagttatctaaacttttaaagcagtctatatctcctgcccttatttgttgcaaaaactaaaaaaataaaaccaaacaaactaaaaacaaaaacaaaagcaaaaatacagtgttattataaaactccagtcatctgtgtttttgttaaacaagagtgtgcctatcttttgatgtaaatatgaaatgttttataaaatcagagatagccatattccagaaaagcattcaataataggcaattttttaaaatacaaaatggagatcaatcaaaaggttacttttttccatttgttctttatgaaaacaatgcatcaaacttttccccctaattgtatgtgaaatcttccttcagctgcaaacagctccaggcctgcatatttctgggggttcacaggaatagataggttggggacccatacctactactctgcaagtatggcaagataggtgcttcctggaggaataattcaggcctgtctttgcctcctaaattaccaagggagcatttagtgacaactgcacacagtgcaaaatctgcagggattgttcattctcagagctgtaaggatagggtttcttaaggtcacagtccttggcttgtgggaagttctctcctttctggtccttcccatcataccatctctgatccatctctctagcaccgtgttctggctactgccaattggacacaacttagaatctcttggaaggtgagtattcaggaagaattgatagacgagattggcttggaggtttgtcagtggcaaattttcatgacttttattaatgtaggaagaccaagaccattgcttggagttcctttccttgtccaaggtgctataaacactataagaaatgagctgagaggaagcaagcgagctagcatgcttacatctctcagtgtccttgactatggatgtgttgtgattagtagttttaaattgctaccaccttgacttcacctccatcatggactggaacctggaattgtattaaaataaaaaggaactatttcttccctaagttgcttttggtcaggatattttatcagagctacggaagtgaaattttaatacaaacacataactctacatgttcatttcctttgctaacttttcaaaaccctttcttcattgtgttttacaaactcttacttcttaagcctaataggttttctgtcccttaatagtaggtctcttcaccaacagagtaagccagatcaagctgttttgaaaaagtaaaagaacaggtctattttgaaaaaagcaactcccagtgactcctccagccaccagagattgaggcagagaagaagcaggagaaatcacacagctgaactatatcagggcagggtgcttatgtaccctgcaggtgaggggtgatgacatgtccacaacagttgggtttgtgcccaattacaatgctttaggtagggacttgggctgctggcaacttcaggggaggagctgctgcagctgctaagaatgcagaactgggattttagtggcttttctttgttggagattctctgagaggacagggtttggagagagatgattggggctttcacaggagtgagctggaagttccaagcgaacaaagcctagcatctaaatttttaaactcacagctcattttgaaatcttttaaattatgactatattattgccttttgtttatgcaaaacacccaagacacacttcaaagggacaaaagactttattctaaaatcaagtaccagtgacctcgacccagagaacacacatttaggtcattccaatatttttttttttttttaccactgcctggcaaaagtcatcttttcttttttttaaaaaaagatttattattttatgtatataagtgctttatctgcatgtatacctttagccagaagaaggtatcagatctcattacagatggttgtgagccactatgtggttgctgggaattgaactcaagacctctggaagagcagccagtgctcttaaccgctgagccatctctccagcagtcatcccaaatttcatgggtcagtgtacaggcagtctaatgcagttctcatagtaacaaagaaaagggtgtaaaaaatcaaaatacttttaaaatacattagtacaaactttaggaaggcaggctaaaccaaagcaaggccacctctgctgtaggtctcagagactgcctgcttttggttgctggaaactagtatatttatctaattgtcacaaagtcactaggtcagccacagaggaggacaagaaaggactattaagagggatcaaaagatggcctatcataatttttctctggagttgcaacattccaaactatcctgagtcattgacattctaatcagttaatcagccttgcagaaggtactgctcaaaatacactctcaaaatacaacgtgtgtcttaccgacacttgcaatgctttcttttgccacctacacctcccagttaccctcttctgtctgttttattttatagatgttgccaaaagtaaataaacacaggtcatgtgtaggacttttcccttcagtgctggagaatgaacccttccatggttttaaatatgttagaccagctctgctatttcagatacatccccagttttaagagaaactgaagtaagtcttgccagtataggtggtatagaaagtcttgcattatcaccagtctggtgtttttgctcttttcctctaacttaaaaaaaagtatttatttttatgtgtatgtttgtatgccttatgtacatgcatgcaccttcaggtgctagcagaggccagagacatcagattccacggaactggaggaacatactcttgacatagattctgggaaccaaacctggatcctctgcaaaagaagcaggggctccttcactgctgatccagctctccagaccccgggttgccatcatttctttgaacagtgttcccttcactgctgtaaatttcaataatttttttacttcagaatttgcatttctgaacatttacattttcttcatgtttgttctttgatttgctattttaggcaatattaacaattcctaagagattttgagatgctatctttattatccctttgtgagtgcatgaaaaatagttggcagtttggagagaatctgttaattttgtttatttccatatttccatgagggatttccatttttttatttttcccacccagaaactatgcttcttaataacctataatgttcatattatatactttcatcttaatctgagatccatctaggtccatattttggtgagatccagtttactataaaaattactctagatcaaaatattttaaattatcttttgtctttttaatagagatcatttcttaaccttggaagttcaactctttttgtagcatgtaccagtagagctgacagtgtcttataaaagatgttcatgacactttaagctatggactttaaaataatttttaattattacattgggaattatatagaactaatacatcttaagaataatgcagtcaactgattagtttttctttagtatgttctactttctaaagaaaactctggcttctagaaaacttgagcataaagtacaaagaattctcatctgctccattcatttcctcttcccctggtctctcctcttaccttgcatttatatagtgcaattgctgtatttgtgaattagtgttactacattatcattacctataggtcacattttggttaggatcacttgttcatgttacccagttttgtgttttgccaaatgttcaatgcgtttatgtcagaatcacagtctcatacataatagttttacttccccagcaggaacctgacccactcactgcataatcttttccctttattatttacttttggcagaatctgcatcacatgcatgtatttttctcatgttgacattttcccaatggcaatatgtactaaagatagattcatttgtgtcttttcttggtttgatagaatcatgctatgtagcccaggccagcatcaaactcctcagcttctcaagtgctgggatcaatacctgacttacattcattttaccattgaatagtattctgtacatgaatgcactccaatttatttatttatttatctctaaagaacaccattttttataacttattatttttatttaaattagaaacaatcttattttacatatcaatcccagttccctctccctcccatcttcccattccccctactggctccccatcccatccccttctgctcctcatggaggataaggccttcatggagaatcatcaaggtcatttgggccagggcctaggccctcctattgatgaataaaatggaatcgaagattggttaataactggtaatttattaggggatatactcatacaagggaaccagtgaccaggttggcaccccaagcaggtcggaccgagaatgcttcccagtgctggctcagcctagagagaggccacatgctggcccccctctctctcataaaccctgctacttacctgtgaccatgctcaaacgggcgtggtctgcagtacctgtaatcagggtctctcccctacactctcccccatatgtctaggttgagagagtagccctccatggggaatgggctcccaaagtccatttgaacatctttattgcacttttaaaagttatgaatggtcttgtgtggagctctatgtagacgtgtaggtgcagactcagttaagaaaagccgggctcacaattcctaggttccagagtttgtaaagaatgccagtccgccgtccaaagcaatgtgccctttgcatccttcccacaaaggacaggaattcctgtcctgtcagcaattgaatgaacaggaaagttgatggaatcagaaatgagcgtgttaagaggagcaatccagacacggaaagatgagtattgcatattttatctctgtgtggagattttactttaaaaacatgtccatggaggacctgaaaatagaaaaggactctttggaggaggaagtggaatagcatgagtggggagtggatacaagaaggagctacgggccgaaagcaaaagctgcacgtagaacatgtcagggtgacattcttcattttgtaatattaatatacactaattgaaatgccttaaattaaaaaaaatatttgatcaaacaaatagctgtctgtattgagttcatgtggttgctaatttttagtcaaaggttctttcacaggtggattgaaatattgagtagaaaactctaaaggaacagattattaagtgttacagaagagtttatatacagactctaggaactaaagctacactaagaaagttgaaattccccgtttggatttgaataacagtgttgctcttgtggaaccaagaagctgaatttgatctcttggccttaacacatatcttacttttcctccccagaattttctgggagtttatcaggatgaaatttatcctaacgctgcattggacaaattcaaaatgtacaaggggaaagcaggatagcttaattatgtataaagagacactaaaaattacagatcctaacatggtcctgtagataagtcctaataaacaaatcatcaaatcatttatggggttatctcttaacttaccccatagaagacattaaccagtcacttaatttttatcttctttgatattctttgtattttcttgtctggaaaagaaatgcacattactatggagcaagattttagtacaaatgtattagttatttttatttggtagcattttgaattaagttattaggataaaagaaatgtaacgttcctttaataaattaatgaaattaaatttactttaattctcagaaactaaggatagcaataatctcaatagaaatgaatttccacattattattaattattgatattattttgctttatgtcacaacaatgctaggttccacaaacaacaacaagagcaataacaaataaacacctaataaaatggaggtttaaaacaacaacaaccaaaaaccaaaactaaccttgtttcaaaatgatctaagttgctcgtggtagcatgtcaatgagattcatgctcgggcctgagaagttgggttggtggcagtcatcaggcactgtgaatatggcctctgttgagacaacactggagggaaagcacatgaccaggttcacatgtactcaagaaaacctgctttacctgtctgtcgtaagtgcctgaggttgtatcactcctgttactcagtaatgtgagctcttacaaaatggatgcacttctgttcgagtatctacattcaaacccagaaccttaacatagccataaaattaccttagtatcaagaagaagaacagccaatcttattgctaatgttataggtaaattttgcatgcaaagaccatcttgaatacaccagtaacacactataagaaaaatggactgaaaaaaacttttaactgtcaggtagttaaaagaatatatagccaatggcgtgtgtgtatgacatatatgtttgatatgtgtgtgagtgcatgtgtttctgtgtaaaagagtgtttgacttcttcagttggtagagaaagacaaattatttcaatgtcaatttcacaacagaatacttaatgtgaaaaagaaaagactaataagtagccagatttctcatttatgtttagatgtataacttgttacgactgttttggaaaactttgtagtaacatttactagagtttaaagcatatatacataacttatgacctggaaaaatgtcaaagatatacaacagattgtttatatcatcatagtttatattagttagaggttaaatgctgccagtattcaatgggggaaaacttattgagtaacctgggatttagttattgaacaggagctatggagaaatggaaaactgaagacctaatatgcacacaataatgatgtttacagagatcataatacactttcaggggtcatgaatatacacaatggaaatgtcataggggatttctaattcttctatcacaaacatttttaaattttaaaaagtatgggaaattacagagaaagctgtaatgaacaaatctattcaattgccaaacataccaaatgtttcttggctcatacactatgtcgttttttattctccgggaacctttatccacatctgggaattctccatgtcaatcatactgttgagtgttattacctaatgcttacaattctgaaatctgtctcattttatttttagaactctatgtgtgtgctaaggacaggacccagggcttcgcatgtgccaggcaactgcttcactactgagctatattgttgtgttcatacttaaaattattttcaacaatagcttatttattttttgccatataatcttttaaagtgattttgtatcttcaggaattattcatattgttagttccatatctaacttattcatactatgttaattctgtccccaattgatgaagcatactgaatggaactgaatgaaatttttagacaaatataaaacttaatatagttacattctttagattttatattaagaagagcacaactaagggtacatccactttactatctgattgcaagtccacactggtctcgaactcactgtgtagcagacaatgtccttgaattcctgaaactgctgccttcatttctcaaatgtcagtatcttaggtgtgagcttcaaatatttttaaacacaaaatttagttggaataaatttacggacttacaacacacactattgtaaaacaaaatatcatagcataacacaacactgagtgatttttattttgtttcattctattctcttttattttgttttgtatttttgtttattttttgtttgtttatttgttttttgagacagagtttctctgtggctttggaggttgtcctggaactagctcttgtagaccaggctggtctcagactcacaaagatgcgcctggctctgcctcctgagtgctgggattaaaggtgtgtgccaccaacgcccagcttgttttgtatttttataaacatttatcattctatagccattattcattttgaagtaaaagttggaatactttgtggatctcagccttctagtctcgttgtcttctcatgatccaactctaataataaacttttttctttcttttcttccttcctctctctctctctctctctctctctctctctctctctctctctcttttagtttcaaagtgatcaaagtctagctcctcatttttctctctctgtgtctgtgtctgtgtctgtgtctgtctctctctctctctctctctctctctctctctctctctctctctctctctctctctctggtttctccctgtagctttggagcctgtcctggaactcagtctgtgaccaggctggcctggaagtcacagagatctttctgcctctgccttctgagtgctgggtttaaaggtgtgtgccaccaaggacaagatcattcattctcttttgttgaatctatattagggaaagaagagaatttatcaaagggcatttgatagatttttttttaaaaaaaagtattctttccccttcagatttgtttatcaatgaagttttctttctttaattcatttgaacacaagttggtttgtctttttttcttaaatgagattcagtaaagggaagaccctaccaaggccttagctatgtacatggtctctttattagcttaaaaatgttctctattatatttgatattgataaaactgaaggataatgataattataacttcactgattatttctggaaaaggaaggagagaaggaggagtaggaggaagatagtagagaattatttgctttatatttgacatatttataagacaagggaaagccctttaggaatgttagttctcaaaactgctttatctaggaatgttagagatgaaaacaacaactcccattggctgtgaacagtgggtgagggggactgtgaggtttgggatctgggtgaattttacgttctttgtggttctataagcattccttcttctgttggagtcaggggactctgagagtgctcaacaatactcaggaagtccctcagtaaagacaccccccccccccgttttaacagctttgctgccttgctaggttttacattagaggaaatgaaacaaatatgctatggaaaggtaacacatgtgttttttgccttttcttctttgctttgctttcaggctgtttgtgagtatgtgaggctgatgaatcatttgccttcaagaaagagtgagactggtgagtcatagctttggaactggggttgtggttcactcacaaggactgtttaacccatgcttgtcccttagctgtcaatgagaacatcccttatatgttcttttattttcagaaatccactttgtcgtagtagggaagaatttgtcctggcaaaaactccagtagtgtccacaggacgtcacattccaaatgactaatctttaccccttttacatttgggagtttccctgccttcatgttatagctggaaactattttgggaagtatttctttaaaacatgtttttccttaggtttaccataataagtactaagtttagctttgctattgtgagtttcctactgtatcataaactcaaatatataaaccatttcaacttggtttatgccataggaaacaaaagctaagcaaaatgagagtacatatcacttttacattattaattctattttaaatacataaggctgtcaatgtgcatgaatactctaacatttctcttaccaaagttacagatacaaataaaaatagataaaaaatggaaattagctagtttatataattatcttttcccttctcagttgacaacataaatatgatgctgaaagttagtttacatgtgtcaggatcaattttccattttgtcagtcacgttaattgctatccatttacttgacttttatttttaacacatacatgcagtatgtatcaaaaatattgattaattttctcttgagtatttacattaaatggccataatacgttaaggtcacattggcttccttgaaattggcgttagtattcagtaataatggccataaatattgccaatcttaagagagtatctccatcgccttctaggttactttctttctttctttctttctttctttctttctttctttctttctttctctccctctctctctccctctccctctctctctccctccctccctctctgtctctctctgtctctgtctctctctctctctctctctctctctctgtctttctcctctctttcttctttgacaaaaacatttcactgtagttcaagctagactcttagtcactgtgtaacccaggctgaccttgaactcataacaatactcttgtttcagccactgcagagttgagattttatgtatgacagaccatttctagtcccatgattgacttgtgtgtgtgtgtgtgtgtgtgtgtgtgtgtgtgtgtgtgtgtgtgtgtggtgtatacataatttatgaaggtcagagatcaaactcagcctcagatgtcatctcccttgttttttgagacagggtctctgacttggtttgtaactcaacaattagagtgaactgggtgatcaatgaaccttgagggttgagctgtctctgtctctctattgttaggaatatagtcatactattatgccaagtttctacatttagcttctgggaatcaaactcaggccaccgtgcttgcatggcaagcattttagtgatgagctaccatccagtaactattcactgatttttataaacatgaaatatataattacctgagagacctgtgaggaaatgaagaagaaaatagacaaaatacaaaagtacaatgcaagcaaaaccctactgtgcaaagttcagaggaaagagcagatactagtttggtgaagaatgaaatgaatcactgttaagtttcctggaaaaaaatccctcttttgcatcaggtaagaagttccctatgacacccattgtatggtggttgctaatccattaatctttacaatgtgaagttccaggactttgcttattgctcaactcttctccaacacctgggctccatttatacactagttatgtagtttgagtctattcaaaaactaagaaaataggccttcctctgatagtaacattttaaataaatgtcattaaaattaaacttttagaattgattattcaaaatgctgaagccatctggagcttcaaatctttcctaatatttgtgctagtacaaaactgtcttgtttggaaggcagaagcactgctggcgaaatataaaaaagtactcagtacagcacaatttttttttaacatttcttactttttaaaactttatttcaattagaaacaagcttgttttacatgtcaatcacagttccccctccattccctcctcccctgccccccactaactccctatcccattccctttcagctccccagggagggtggggccttccatgggggggatcttcaaagtctgtcacatcatttggagcagggcctagacactcctcctcacctccacctggcaatctatgggatctctgttagtggatcaatatttatccctagtacatgaatgaactttgggagcctactccacatagagggattctctctcagcctagtacagcacattttttttatttaaattctttaattactactcatatttacatatcaatcccccccattccctcattcccttgccctcccaacctcccatgttccccaccaaccccttcaacccatccccaaacttctctccagggatagtgaggccctccaccagggaccttcaaagtctgtcatataatttcagggagggcctaggccctccttggtagtacagcacaattttaaaacctacaagtgagttgtatctcaagtgtctataagtttttatgaaagtatagccttagtgatacaccttctacatacaaaaatagtgacaagcacagagaaataaagtacccaaagtcacatagtattaagtgttatggttgaaattaatctcacccccctcttttcttttttcttttagttttgtagttaatgtgcttctgattctgtaatgttcttagttttaaagaagctccagtaagttccttaagacagggcaaggagcttaacatagctgaaattcaaccattctaccactcctgggagaaattaaaacacagaaggaagaggggggagaaaattcacccttccttttctgtctgtaactgagttggttccgggagtagttttgcaagacttttttctccttggttttgaccagggctgagccagttcttcaaacaaaagacagccagttactaacttctggttgctaggtgtggtctctgttcatatcctataaaatcagaagtccagccctccacttccagactgaagccgtctgtacagagcctcaattcagttcctgggaagacaagaaaataaaaaggtaaggctaagcttttgttttacagagttctgcttggtttagaaactacaaaaacctgtgagaattccttgcatgatttgcctgggcttcatagagaagtgttgtgactactgaactctagttatggctagttgcatttaacgtaatttaatgactctggctgtaaaattacattgtattgttatcttttaaacatcaaaaatcatagttttgcctttcttatctaacaaatgcagttttgaaactctgccaagtttactttttggccttgttgttgagttaccaatggaaagagaatgtgtgctccttggcttacaatcttagaatgagatgtttctttcctcctctttggaaaatgttgtctccagagctgtatgttttgtggttatgcagggctggagtgggaggcaggatgcaggtgggggcccagagaaaccagaagtggcaaactgaagaatttttccaaaatagaacactttatagctaaaaatacttttctttaaaaaaactaaatgaataccactttctgagtagtctccatgacctttttaattaacgtttttgaatgaatgttatgtttactcatagtttaagatggtccgcttattacttgtttcatttaaacagggagtggccacattccctccctataatctctccgtgtgtcatagaccggcttttctggtgctcattttgtaaacctaaggggaaagcagatttttcctgggtgatgtcagataaatcattccactgactgccagaggggcccacagaaactcctgctgagtggcattttggggaacacataagggaaggacataaaatccctagaaaaacaaaatgcagatccaaagctgcccatgcttggagagacttgagagagagagaaagagagagagagagagagagagagagagagagagagagagagagagagacagagacagagacagagagacagagagagagaggttaatacctaactacaagcttagcatattagaaaactttctgggacttttctcttagcccacttaaaatattaatgaattgccttaactttcaatcttacaggagccaatcaagaaagttgtggttcttcttgctatagatgcccatagttgtgtgagacctgagaaatcaatgtcccctaacactgagtgaggaatgtgttttgctagctgcagataaggcctgtttcagttgattcatatgtggtaaaatgctggtttcctgattcagaaatggcctcttctgtagaagttacatggttaccagaggcccagaaacacacccacaccccttagatatctgatatgagatgatgctggcaacactcttaaggaaccagcttaacttacatgcttattaaatactttctctactccctccctccctccctccaccccacagggtttctttgtgtagccttgtcaattttggaactagctctgtagaccaggctggccttgaactcacagaaattcccctgcttctgccttctgagtgctgggatatctgaaacatctgcaaagttgatttctgagcatgaaaatagatagacagactgactgtcttagttccctctggaccaattaattccttacatatttaaagtcagaacaaaacaaaagaatttactgatccttagtgatgaaccatgagcatttctaaaagtgaaatatgtctttttccttcaaacttgctcacatttattagaaagatcaaatattcagtctacttaatatccccttcctttaggctaattctctcttgtattcaaggtaaaatgtaaactatgtactttagaactacaacagatgttagaaactttattttaacattctcattttataaataaactttcatgtttttgtgaagtctgatttttagttaaagacacttaaaataaggcccaggacaccacaattcttccatttaaaatactattgttatgggtcaaatttgttgcttaaatttgtgtagctgtttcccaatgtgctgtttgtttatccaatgatgcttatttgtttatatactaataattcgaaatccttgtgagtatatagacttccaggtacttcatgaggtattggagatggacaatgaatgggctctgtcttcagggaagactgctggaagtatagatgccaacatgaagggataatgcataatggcatgaggttattgggtggatagaaacatgatgctttgggaaggtcccttagtgcaatgctgagtaccagtgaaggcatcatggtgatgcattgaatcctcaatgcttagtcttcatcaaatagcagtgagtcagacaaaagacagcagtgtggatgaggtcagagaattccaggcaaaagaaactccctgttcagaagcctgaggcaaaatatccaggagctaccttttgttaaatgacttaagctgatgtcattgtgatagtctaattatcttctcatgtggccattgaatagtctaattattttctccacgtgggtagttgtgggaaggatttacaaaacacatcttcaaagaataactgtacacaagacaaaaacatatgaaaataaataccctcaggctgcagtgaaacctactgaatctccatggatactccactaatgaaactgattctcaagtgtattgaaattaatgttgatcttgttctcatctctttgctcactaatgtaaataaatatatagtattttctagtgagaaagcatatattttaattatgaccactgacactactaccaggatgtctatctgaaaaggacagcatgtataaaaataatgatgatgatgaccaacttattttgtcaagaaatggctagtgattgctaatttcattgtgaaactggtagtcttagcatgtaaccaggacttaaaccatgtagctgtcttctctaggacactgtcttgtgttaataagtaagttactcaacaagtttttcttcattttgtgctttgcaattaatacagaaacagtgttgaaaccaggaagagttggtaaaccaggaaaatcagccactttccactcagactctggaagtcacattccatgacactcagaaagatagacaagaagatgactacatacatattagtacaccaaaagactaacccttagaagtttcccacttaatctgtacataagtagaaattaataggtggtgcatattcacaaaagagattgccaagtagaaaaaaatgtgaaatagtgtcaacttccaagggggttatcttcaaatgagtttattttaatctgagagattaatttgtgttggaactcattgctaactaattgaaatttatgttgagatgaaacattatagtaaaacaaaataatatggaagaaacaaatctttttttgaacccatttaattaagtttgtgtccatgaagaatttaagtgctgagcaggcaaagtggatcatatgtgaatctgcctgacactctttctgtggtatttgagaaatgcttaatatgtaaatcctcctcttaatgaagtctattatctttggcacttagcaggctatgatcaatttcctttggaacagtatgcatccttttacagtccttgcatctttaaactttgctaagagccattagctgactttagaattcattttcttctgttgacgctcatgaagaccattgctttgcttttctggaccatccttctgggctatcatacatactgggctagaatgtagacattcagaaggcctaagctcaaagctgttttctctagggatactcttgtcaagtaaattgctcaacctactgtttcctgttctgttgtacaatataatcaacatactcatcattatttcattaagctttcacagttttcaaagagaaagctgtacactatgcagttctttttaatagcatgaacactgtgaaagcacagtactttcataaaattcctaagatcagtatcaagttgtcatactcacttctgatagtatgttatcctcaggtctgaagaatttttttcccttcttaactgaaagcaacaaagttactgaattctttttaatttacttatttatttttttgttttggagcaagtgatcagatcactcactttgaggactgactcccttttactaggggcttgagtgcagtggtcatggtagcaatgctgaatgttgaaactgccaaaatgcctgtgaagctgtaggtgtgccaatttggcagtcaaaatgtgaaatactgtgtagcaatagcaattgcaccagattcagctatagtgggaagtgcaatgtcatgcatgattgcacattatgactttacctgagggaacagctttgaatgtgttggttgtgggagagaatacagacattggtgaatgctcttcatacaaatgatggaaaagtaattgaatcagctcctttgagtatcccccccacctctgtcaggcatttagtcttgttacttggagcttagtcattcttctagcagattcagactgaaatagtttgttgggacatactaaaaagggatcggtttgtgagttttactctttataagtcttatggctaaattccatgaaatgaattcccagatattatcttttcagcctccctcaaaacaaatctccaaagggtatcagagatagctcagtgttgacactggacactggctcctaaaaatgtgcactcagacaaaaggactcattgatggcatttcatgtatgtagagaaaacagattaattgttaacatacttcaaattttaaaaagatttgtaccattatattcaaacataaccaggctgcaaactgtgcaggcaacttaagaggcatctgctaagatagttgccaaaaagttaagcattttgtggcatcacccaagtaattattgttagaaccgtcaaaatgatgtatataatctctttctatttgtgtgtggagcatacaacaatgatatttaaactgtttaaatttgaagaacatgaagatagttatttactcaaataattttacaccagccaatgaggggggaagttacattaatgagagagaaatatataaagttttgagttgatccagtctagtagatggttccggattattttaccttacaaagtaaacatactttctctagacctgcctttggaacagaccctgattaattccacacaggagtcaggatgaatactggctggtctcacccttttctctgtgccctttaccatgcttccccatgatacagaaatgatgctccatctaaaatacaaatgttatcacattgctttccaattacaagcctaataatgttgctctgagctgtgaacctaccattaaattccttgttgcaacttctatcaacatttctccatctattgaactttactctgcttctcaaacatgacaggatttttctctagttttttttttttttttttttttttttttttttttttttttttttttttttttttttccctctgaagcattccgccagatttgttttaactcatttcaggaaagattccttgaaccagcacattcttcaggagtttccttagcctttttactttcagtaggagagcagaaaccagctctagagtccccccacaacaaaggactccatatcaaagcttttgcaccctccaagtttaccatctgctgggtggtttgtaaatttagatgagacagcataccctgctcttctcccaagaccctatgcttacatgctgtaatccattgaccttagaaggcagggctgtagagaccaagaaaatatctccatttctgagtaaaagctgtgggtttcttttcaacagtaatttcagtctttataaagcatctatagcttacactttattatgctccaaagaataatcatagtaaataagaactagtttactgtttattgcagtgtctcaagtccatagggtattattggtggctgctgagtttgttgtattaaagcttctaccgattttttttccagacacttctttaaaaatggcgatggtatcagaattcctcaagcaggcctggtttattgacaaccaagaacaggaatatgttgtaagtattcaaagtattatgaagtagttaccatgctaactaaaacagacaccaaaatgaacaaatgaatggtgattaatttatgtctcttatataaatagcaagctgtaaaatcatccaaaggtggtcctgggtctgccgtgagtccctacccatccttcaatccatcctcagatgttgctgccttacacaaagctatcatggttaaaggtgagtgcaaatccacagaagagtctcctcttgaacatttcatagaaacttcttgaacgattattgggaaatagacctgaatgacacaaagtctttctctggggcgattaaaaagttgtagtcagctgtaatgccttgtacctttaatatcaatattagagagcctgaggcagtaggattgccatttgagggctacatgtgctatgtagtcagtctctgcctccaaagaggaaggtgttcttcctgtcagtacttaggaaattttggtcagtgatgaaattcctgctgctataatagatgtcctaaccaggccgtttctagtagaaatcaatgcttaaaccagcacctgtgatcacatttagggtttgaacacacatctggagactggtgtccagaactattaattggttctttattttccattcaaatcaatgcaatgtcactttaattccccaacttgttaagggccatggcatttattttccaggctaatataattctcaactttgttatgatgtgccttgaccaccaccttgataatgaatggttttatggcaattgttggtgactaagaaaatggatgttaaagtttcagatcctttatttccaggtgtggatgaagcaaccattattgacattcttaccaagagaaccaatgctcagcgccagcagatcaaggcagcatacttgcaggaaactggaaaggtagggagaatgagaaactcacatgttctgtttgctcatacttacgttccagtgtgattctgaagcacatttctcagctctttctgttttaaacactattaaaccattatccctgagacagttatcatagtatttgtctccctagttgcaataggacccattttagcaaattactcagttcacacactggccattttgctgtaaagttttccagaggtaatgttttgtgttggaggcaagtcatcagtttaagcaaaataaacataaaaatgactatggaggaacaaaaaaaatgttctgattgaagtgcaatttttgttttgctaaactaaaaacgagctgctttatgaagacattgaatattttacattttatgtttctcatgtcaagtacaaacagcttatttttcactgggtgcaataagaaaatggaaggtaccaagcttttaattataatgtttattaggccaatgaaaagctttgtgttttgagctatgtgacttctctcctgtaaaaagcactgagaacacaatcttttaggaagtttttattggatgcagtatatttcatctaatccctctagattaaaagattgaggtagcatcataatatccatcttgctttccatggaaggaaagcgatacaaaaggatgactgaagtgagaagcatcacttaagtgcatgactgttagtaaattactctaattcttttatgtttctagcccctggatgaaatgctgagaaaagcccttacaggccatctggaagaggttgttttggctctgctaaaaactccagcccagtttgatgcagatgaactccgtgcggccatgaaggtaaatgcttcttccctggaacaccaaacaaaagtttttaagatttgttttatttgtatgagtgttttgcttgaatgtatgtgtgcatgccccctctgtgcctggtagtctcagaggtcacaagaggccattggaccctctagcattggagctatcctgtgtagaccacaggaactgaatctgggtcttctgcatgaacaagcgcctttaatcgctgagccttcttaccagtcccctaaaagactctttaaaaaattctgtttttatttaattctttctttctttaattctttaattactactcatatttacatatccattccctccattccctcaccctcccatcctcccatgttccccaccaaccccccacaacccatcccccagctcctcctcagggatagtgaggccctccacaggggaccttcaaagtccatcatattattttggggaatgcctaggccctccttgttgtatctgggctgtaatagtatccctccatagggaatgggctcccaaagtccatttgtgccctacaaataaacactagctctactgttagaggccccatagactgccttggcctcctagctggcacccacatttagagggcttggttctatccaatgctgtttctccagctttatgactagggtctccatgctctcactaggtcaggtcaactgtttctgccagtttctctatcaccatcttggctcctttgctcatccctcctccctctccacaactggattccaggagtatgtttcagtgtttagttgtgggtgcctttttctgcttctaatagctactggatgaagcctctggatccacatggatgaccccaactaagaatccaggcagtggtggagaggatgccctttgatgcccctcccctataatgagattggtgtctaccttcattagcattcctaaaagactctttaagacaaactcctttcctcaaaaaaatgtggaggaaaaatatgtttgttactgtggttgggccttcattatctaatacaggactgtcaattagtccaaatttaccgaatgagcaagttcttaatttaatgaatcaattggtggatacatgaaaaattaaatattggaactaatgttcttcatgcacattaaatggataggtcaaatatctacatttttaatcttcatctcaaatactgaacaaaggctactttgttttagaacagtatcatattttttaatatgaacaaaattgactcaatgatgaattacagcactccttgtgtggagaaaacaagttgattatcttaaatgaaaaaaaaaacttaagtgtattttcttttctttaaatgcaggggcttggaacagatgaagacactctcattgagattttggtatcaagaaataacagagaaatcagagaaatcaacagagtctacagagaaggtcagggtcagcctctgagttcttagcaggacaggaaaccagatagtactttctggaaatcagctatgggtggtaagggtgtgtgatttagaaagcctacattttgaagcattccttttctggttagcccatatctctggaatgcagggtaagatgccaatgtgaaaacacatgccccagccatctgcaactagcaccttaatagaaaaatatctcctggagctaatgagcacaaatttcttataaagagaattaaattcagaacattggatttaaataactttctgaaaatatttctattgctctgaactaccccatgccttttattatgaagagactaaataataatattaaatatttctgatcggaccattttccatttatttttctgatctgttgttgggaaccttagctttaccactgaggacataaatgatccagttcttctttctctgtgcttagatagatacttggcataaaagactatcagtggctcattgggcagtgaggccttcagtcaaatgactcagtccttactgcacaggggacagctccacatctctggtgattttctagttcctctgagctattggctttctgttttgttaaactaatatgtgagcacatgaaacatctttgtgtctgaccctcttaccaagtactcagggaacaacaacattgcacattgttctcactttagtacattagtcaaaatatgaccacattttctgtaattcttaccccagtgtcttagatccatttcctggtaataataattcaagagaaataattgttaatgtgttagataaaatgcagtttacaaagccttacatccacatttctctaaaatcctgaagatttggtccagaaatagcttaaggtgctgtttttgctttgtttgtaaattcagttatttttcctactaaagcaccatattttatagccaaatgatgtctgtagacacaagttttaaataaatgagctcacatgccattgaacatattatatattgaatatttataattttaaggtaaataaatagccagtgttcaagcaagtaacatttttcaaattttcacatattgtatttcaaaatgatttggtaaagtattcattcttgttagcaaatatttattactaacttttcatttagagtattattcagttttcttccattgatctataaaaaattattttatagcctaaaatttctgctgctctagtttctccagtttcacaaaaatgttttgagataagttacatgagtcattcaatcttgtaaactataagctaatgcagacaccgttgttttccaatagttaactgaaaaaattattttctcttcttgtagagctaaagagagatctggccaaagacatcacttcggatacttctggagacttccggaaggccttgctttctcttgccaaggtatgggttaaatgtctttgctattataaataataaaaccttagaattgtgagcattttctaggaatgagaatctctttcctttaaaattaatactgcttcattgatgaataatacttgtaagtatttgaggaaataatgagacatatatatatatatacgtatatatatatgatgtaaaattagcaatataaaaacttcataatctcacttcctaccactttttcagtgagatgtttgaagtttattttctagtcatttaaaaacactcactgtgttttgattatgttcatcttactatgttgtaataccacaatgtactcctcttatctattagagactgtgtccttttatcagtatcctccaaccttttgttccccatcctaccatctctggtcatcatcaatgtgtagtctgcatctatgaattcaggtgttttaggaagcacatctaaatgaattcatacaaagttgctttgttctgtcttgcttctgttcctcccagcaactttgctgcaaattatagatattgttttcactgtttttcctcaaaagttatgtcttgttttaagagaattaagtgtatctagtgattacatcctacagaaaatcttaaaacatgttgggcatttttcagggtgaccgctgtgaggatttgagtgtgaatcaagatttggctgacacagatgccagggtaagcaaaggggagacattatcaatgaagcaagtcttcctaccttcttgctcccactatgtggaagcacatctcaggtcctgtgagaagacaattattacttaatgtttatttcattagaaacagagtcttatatccctggaatggaaaatatagtctttatgtttccaatttatcttattgtttagaaagccagagatgactgaaagaacaatgagattctgtctctttcccaaaacctgttgggtggagaaaaccccaagttttgacttaataagaagatagctatatgtaagcccaacccctttgtgctataagttgccacaatttgagatcctctgtcctcagtatctcaattgctggcactagagacattcaccatcatgcccagctgggaaaggaaatttttgctgagtaaagtgaaatcaagaaacacattgaacattatgttttaatagaaattgtgcaaacatataaaaacaataattatgcataattgcctacaataaaattattcttatcatgtctatgcattctctttccagactactagggctccttgatgtatatttacagagactacatgattagtatgactcagcattaccaaagcaaattaaagtttgaggttatggtgatggtacatacctttaatattagcaacttgggaggcaaaggtggttgaatactttgagttcaaggtcagcctggtctacagagcaaattctaggacagccaatgctaccagagaaatcctgtctggagaaaccaacaaatgttttagagttagtagaagatacttataaccaaaaggtagggattactatcttcgttcataaaggaggaataactgtatttaaattacttcctaagattatacagctttcaaatttcagatttgaaacttgtgtacagaaataatagcatcaaaatggcatatccttcagtagcaaataaatctgaggatataggaagaaaatataagacctaggcagtgattaaatttttatgtattaactggacagtggtagcactcacctttaggcccagcactctgaaggcagaggcaggcagatctctgtgagttctaggccagcctgttctacaaaactacacagagaaaccctgtcttaaaagaacaaaaaaaatatttattgatattttttgctaatgggcttcatcccagggatgcaaggatggttcaacatacgaaaattcatcaatgtaatccaccatataaacaaactgaaaaagaaaaaccacatcatcatctcactagatgccgaaaaagtctttgacaaaatccaacatcccttcatgataaagatcttggtgagaacaggaataacaggaacatatctaaacacaatacacaccaaaccaatagccaacatcaaactaaatggaaactcaaagctaataatttctttgagcaataaaaagtagaaaaaggaaatctgttttaatgagttctttgagttgtctttgtaaacagagtaattttaaagcaaacagatatcccatatcttctgtttatcatgtttacaaagcactttgaactatactgctgactttattgtcttcactttcaagaagggccaaccccagggatgcctactctgatagtattaagtacaacataattatttatataacctttgttaaatataataatttttgtttgtcatttcaatgcatggtcacatgtttacttattcatttcttgataggctttgtatgaggctggagagaggagaaaggggacagatacgaatgtgttcattacaattctgactactagaagcaaatctcatcttcgcaaaggtaacaagaagttcgtttttctggaatatgtttacggaaggtccaaagttccttatggaggagaagtaagaggaagggaagaaagaggtctttccatatcaaatggatgcaataacactcactgttatgtgcccatttgtcagctttgaactgccacagtccacactactgagaacacactttgtgactttggcatggacaacatcacttatttccactattcctgttctttcaaagttttggagtagtcacaacaagaaatacaaataaaacataatgaatgagagaaaaaagaaacaaaaaaatatgtctagagcctaaatgaaggaaagaatatttagatgatgcagaaataagaaagagcaaaagaaaattccctgatttccaaagattcagagctaagacttagggtctgaatctttgggaaggcggagtataaggataacacaaagttcatcactgcataccaacatagcaagttcctgtactacacaaaacaaatttgctgtactgagattagaatggaaagaactattaatattgctgtagaaagtagtaaagatgttaataacctggcatgtttgataatggttggcacttgcaatatgaagatggaatagacatattatgccgagtcatgcaaatagtctttaaaatgtcactgaagttcagtgtacccaaggagctccttgagtcagttaccctgtgttaggaataaagcttaatggcctgggactgcaggtgtcaggtcaccaataatacactgggacctggaggatggcagtcctgcacctgtgatggtaggtgagtggatggggaaacagagacctgtagacatgactcatattggaagttttattgagggggaggtaagaaaatgagggaaggaaagagaaaagaggtaaagagacacagagatagggcagaagagaaggcgtggtgggagacaggaaaggtcctgtctgtccttcagagaaacagcagggtttgtgaaaaggcaggctgctttgcacaaatcttaacttcaatttcctattcagtatttcagaactacagaaagtacagtgaacatgacatgaacaaagttctggatctggaaatgaagggtgacatcgagaagtgcctcactgcccttggtatgtagaagttgcatagacaatgctctgacctcagctcatacacttgcatttcactgctgccctaatgtaagacaaatctcctgtacatacgatacatctatgcatctgtgttcagactgggaggcaatatgtaagactgatgaagaaatatggatgcctttttaatgcaacgtatgttcttcaagatacggggatacagaatatatttttgagcacctgtttataaagtggtgcaccaaacagtttatatctcctgggccactgtggatgcttatcaatatcagcacactcaagtcttggtgtaaccacttgttcagtcttgagcaagtcctgcaaggtggtttggagcaagtccaaatctagtggtctggaacccgttacatgtctcccagggacatagtctgcttctgcaagccagggttctgatttcctaagaagctgtgatgggtatcagtcctgatgcccacagatctcactttgagcagcaagatgaagatataactctgcagatatgtgcaagtatttgttttgggcagctgctttgtattcagtctgctgctgtgttgccttgacgactgttcagatacaacacaatcaggtatttctgtgcctgatatttacactggtttccccatacccacagagaggatagtatgttcagggtagagtccctgctgaatattgacaagggaaagaatactgataaccaccttgtagaaagtgactctgtcttccaataaaagaaacatcccccgttaggcaggagggctagaacacttttttgcaaagttatttcctatttattcaatatgtatctttattctgtgatgaatacttaaactaaaacttgtgtcttttacagtgaaatgttccaccagcaccccagctttctttgctgagaaactttatgaagccatgaaggtactgctctacttataggttttaatcagaggagaaattatctgtagatagaagagcagagaaactaacagtgctcaaaaatcactatacatattttcaaagaaaattctgctttattcgacttgagggggaacatgtattagaataaaccagttgggtttggtgtatttttgaaaaggtatgtgtaaatgtgattatgaggtgagttagcaagaagtttacaggtgattttaaatgtgcttaaaacctgaatcaccaggaagagtggtccactcctccttttagtatgtgacattaatgacctacttcaaccaaggctgtgagctttatacttttgtcttcctaattgcactgtctttcctaccatagatttagtgaccttttaaaacatcattccatatttagagaaatagaaggtggtattgggatgcattgatatttcttttactttattctaccctgaggaggttaccatactggacattgccctagcacttatattttgagatctcaagacaatagttatgaagtgacctttcctctgtagcacatgaataacgtagccttaagagagagacgaaaagagctaacaatttaaataatattggcaagcttctgtgaaaggatagacatgttcccaatgcttgtttaataaagacaggcacaataggtctagttaaatataaattaatcccctgtctgtccctatgctcactgatttctgggtgatactcagatgagtagtgacaaatacctgctatgaaaaagcaacatatgcccaaaacttcagaagtcaatatagctttttctgttctaatctgaacccttaagtttgggccagaaagatgactcagcagatttaagcacttgccataaagcctgatgacctgaattcattccctggcacccgcacggtggttgaaggagagaaccaactcctgaaagttgttctccagtctcctcatgaacaccgtgccatgtgcatccataaacacactcatgagtgtacacacagagataactataataaataattaagaaaatagaacgaaaacttaaaaacttgaggtttaaataagagtaggtgtaagtaggagagtgggaaggaagatgataagggtgaaaaagccggggtgactcaagagaggaaagcagcatacattgaaagtagagtagattatttctagacagcatggatgattaggtatgattctatagtcgaatggctaccgaattatggaggacattgtatgtccttagaagatagttggttcattgtaagagaaatgggagaccactaagaagtttatgatcgataggttagatttatgatttcagagaaataaaaacattttgctatttttggatagttcagatacagcaaagactggatggtggaaagccagttagaaagctgtagaaaccctttttaccttctgctaatataactcctggtctcttctttcattgccactgttctctctctctctctctctctctctctctctctctctctctctctctctcccttcctctctctctctctctctctctctctctctctctcttatagagaaagagacacatggtaaaaggagagagaaaagataagaacatatagggttcattttctctatgtagcattgtggaagggtaaatgggacttcttttgaaaaccaaatcttcagaaagaggtttcctacatgtagtgaaaccatggtctgtctgtacagggagctggaactcgccataaggcattgatcaggattatggtctcccgttctgaaatcgacatgaatgaaatcaaagcattttacctgaagaagtatggaatctctctttgccaagccatcctggtatgttgtgcttttcaataatgacacctccactaaagatatagttccttgtgcaacattctccaagagcaaaggtgatgtgatgtactatagctgcacattgcatacacaagattaactcctatttttcaggtgaatgattcataaataaatgacacctgcacaaaagatatagttcctcatgcaacatttaccaagagaagaggtggtgtgatgtgctatagctgcacattacatatacaagactaactcctattcttagggtgaataagtcataaataaattaccatagttaaatctagtctagcaaagaactaagtatatctttgaagcacagagaaatgtttattttaggttttgtaatatagtcctgggatattgcacagttcttagaagtaccaatactcatcatgacttatattgttaaaacttaaggattgaaaatttagtagtaacattaatttccagtgtttggattgctactaaagatctttcctatgtaaaaacatttaagatgtatgttcaagtcatattactagagtgtgggaaaataacacaaaacaataactcaagggggttaattgtattggaagataatcatttaagttcatattatttgcatttgacaagtaaaatatatgaagaacaaatgagaaaattacagacccatagttttcactccttctattgggtaattcacatatttccttaggtgcagtatcagattatataatgcttcacataataatatgatatattgatacttagaaatacttgttctagtatacaatttgttcaggctagactttgttctgttttcagagctgtttatttttctctgcagaatgtttaatttagatttttttaaaacatagctatatcacatactgtaaagtatgacttgtctttagctgactttacaaacatcatgattcttctacactaaaaatatcatgtattcatcatgattttgcatcatgtcaaaaatactctcttttttaaccaacaggatgaaaccaaaggagactatgaaaagatcttggtggctctgtgtgatggcaactagatgtccccgctgctcagaagcactgtgatgagagcatctcttagctgttgctttcctctatcacacaagcttaagtaagagggttgctttagcagataacaagctaattacccactttgaataatataacatatgaataagttttacatcatacctctgtacaatagagaaataattgttttattatgttttccccagattataaatccctataagcaagttactctgttagcattcctgagaaacaagtttatgtagactaaaataaaacaattttataagacaattggtgtgttatcgtctcttacagtttgattttcttttttctttgtgtgtgtgtgtgtgtgtgtgtgtgtgtgtgtgtgtgtgtgtgtaatcaaatggcttagtttaacaaagaagaagagaagtctattttccctattggaagaagattttaggtacgaaattgcaaagttataccagaaagcctctccagaaaatccaacaatttcctcaaagtagcaggatacaaaatgaacttagaaaaggcaatggccgttctgaatgccaatatcaagcatgctgagaaaggcattgtggtagcaggcaaattcacaataacatctaaaagctgggaattcatctaaccagggtgatgggagatgtctttctgtatgctgggaatatattctttttggaggggggtaatgcatgttttagtgtgatatgaggacagtggtgattataaataaaaaataaatgagaaaatcagcatcaagaatctagaaaaacttcagtaaatattagaacatacaagtgccactgctaagggtgatgtcaccttcttaagcaatagattgtcctttaacataatgcatgacacagcttataatatgagaaaccttacaccgtttcgtattactaggaagccaaatgcaatgcgaattttcgtatttagtaaaatgctatgggttgcgtaatctgtgtttttacttctgcagcttgttaaatccaatagtgctagtttttatagtgtaatgtaatgagtgtaatgagtatctgccagctgtctttttttttcattctgagaatatggaatacaaatgaagacaatataggagcaggaaaaacatgaacaataacagaagaaagtggaaatattaaatgtgagagaaagaaagagtagcaaaatgcttgaatgtgtctacatagcaagaatttctaaggtactgctgttgccaatcatgttgaatccatagctgtaactagatatggtactagaaaaggaatggaagatgctggctatgtccaaaatgccagcaagacagattatgaatgtggtggtttgaaagaaaatgaccctcacaggggatggcactattagggggtgtagttttgttggagtatgtatggccttgttggaggaagtgtatcactgtggaggtgggctttgaggtcacatatatgctcaagccactcccagtgtctcagatcactttttgttgccttcctgatcaagatgtagctccttctccactctcagctgcttctccagcactgtgtctgcttggatgctgccatgaccctccatgatgataatggactaaatctctgaaactgtatgccacccaattaaatatttccctttataagagttgctatggtcatgatgtttcatcacaacaatagaaagcctaagtgagacaatgggggacccaataacgcgagtgagcagaggaatttgtaggacctgggcatggttagagcactgatacagaggtccacctggaggaagacagaggagattgcatagcttaaaattactttaacaactggagcaaacatgtgaatttagactggagagacagctcagaggttaaaagcactggctgctcttccaaaggtccttaagttcaattcccagcaaccacatggtgactcacaaccatccataatgatctggtgtcctcttctggcctacaggcagaccactgtataaataataaataagtcttaaaaaaacaaacaaacatggatcccccctatggagtcttcatcactcacatatcagcttattttcttattttatcaagcatgtcatttgtttcttatttgtgtgacaagaattccatatgaattgcataggctttggcataaacatacagcttttatgtaattagcagtgattccagcttcattaagttgtatgactgaataaaaaaaaaaaaaaacacgtacacacagagacagaaaacgagttgcacatatttgaggccccaaagagaaatctgcacaaactcaggcatagtcccaggctgagtcattaaccagattatccttttggaaaaatagtgtttggggcagtgcaatggaaatataattttaggcttttttctctgtctggaagcaatgagtgtggtagtattttcatggagaccgtgaccattggaacatttgtgttggcagtatacaaaccagctaattgatttcaaatgtttcaactcttgtatctttaaataccattttaccaggaatgtggtgtgtttaacatctacatatgtttcttttggatgtctggattttgagttctattttagtctttccaaacttaataaaacctaagaaactaccaaagaagtgtgcacaaaacttatctacacatgcagaaaatctgtattttatgcttattttcaaatgaaagtaaagaaaaaaggagaatgaaggcgcaaaggcgaggcgagaaaaggtgaggaacaatacatggagggaacagcaagggttgggggaaaagagaaggagggagaaaaaaggaaagggggactgaaggaaattattgccttgtctataatggaataataaactgaagtctcctaatattttgaaacgatgaaggaagaatagtttggcacatgttctggttagtttttgtcaaactgaatcaaactagaactaccttagaagaaggaacctcacctgaagaattggccagactatatcaactcatggccatatttttgaattaatgttggagggcccatgtcattgttggcagtatcatctctaggcaggtgtgctggaatgtactgtattaggcaggaggagaagaactggtttaggacatttatttatttatttatagtgaacacagtccacgtagtccaacaatggctgtctccttccaaagatctagcagtcccattctgatgctaaagatccagggaattcctagagaacttctggtggttattctatattggtatcctgaagaagtaggttctagcaccagcgaagcaaagtaatgactcaggaacaggatagataaactttctagcaagagtgaggacaagaagacaaaaagaaaagctttcctttttccatgtgcttttatgtagactgccagcagtaggtgtagctaagatcaggatgggactgcccaccaaatcatccactctagcaaatccttcagaggcacataaagctgcttgagtttcagttgattccagatgtagtcatgctgcccattgtttcttctttctcttgaaatttgatggattcagtgaaacacagcatttcccagaccattactgaccatctgtactttatatcttcttattggttcttttctgccttcacttaaagattcaagagtttttcaagttcaaaaaagtatgtaaaattagaaacagtatctaccctagtctgtatgcatagtattgaataccacagaaacctaaggacattacttactttaagtaaatggttggtgatatggctctgaagttaagagcacttgctgctcttggagaagacctgggtttgttttccagtactcacatggaagcttatgacattctgtatctcctgttccagtgattctaacgtccttctcaggcccccacatgaagtcaagcacaggttatacataactgcatgcagacaaaacactcttatacctaagctaaaaattaaaacaatgcaattttatgtaacaggtaaattaccaattgattatgtagctgggcaaagcattaaaaacagggtgagaactatttgctgagctgtcccagttcctgaatatttcctgtcagtaaacatgttcacccaggcgaaatggtaccctgaagttctggtctaagctagagtgctgagatagaagctaatgttccccaggtgatcacatacatttgagagcaacactaaccttcctagaatgctgacagaatgtgaacaactgggacattatttaccaccacaagcactactaaacatatttaattgtagatgttccattagaatagttgcataacatcttaatattgtttatcttatccacatatgacagaaaaaaatggatgaaagtgctggaaagaaaagggctaagatacaaagtgaagaagttccaccacttttatttgttggagatcttgtgccgactgaaagtccagcaatgatgatgttttaggtgtgattctctcatggtccaaaaagtttagaattcttttaggggtttatgaaaacacaaatgtcacgaaagcaggtggatcactaggctttgtaccttagcatccttgcatcaacatttgcattattttctgcagctaatctactaaaaacactaaatataggacagtacatattttagatgttttctagctatataagaaggcaatgcaccatattgctttctgatggacatatttataatttatttcagactgatagttaagttggaagactctgggttcatctatttttcgatctttaccaccatctagtggtgaaattgtgaaatttcccttcggttctcttactgtaaagaatcatacccaataaaatgcaatagatctagaaaaactgttctgtgcctttttatagtttgtgatgtagcccaggacacattaaaatacatttgtggaaagtataagaccatcatggaaagaatgtggtagaaaaacatgaacgggggagagaaattatgcattagaattgaaattgttatttatttattattgttgtgtgtctgaatgtgtgctgtgtgcatgagtgtgggtcagaggttgtggtattcagagaacaacttgtgaaagacagttctctttttccacttccgggtttgggacttgaggtcagattgccaagactgcacagtaagggcttttacgtactgaactatgaattaactctagattacatgtctgtatatcactactgtaacagaaaaataatgatttctacacatttgttatttttatttgaaagaaaatattcataaattccactctagttttcctatttaaggtttattttgtgtgatgttaagatttttaaaaactacatgagccattcttgtcgccagttatgaaaatcatcgcaccagtcaccaacaggaagacaacaagaacaacaagtatgccaccaactgaactggttgagttgaacccaggcagagcactctggctctcaccaggtacactgccagttcaaactattaaccccacctagaagtcagcaatttgaagggtgctttggcagaaagcatcccaaaccttggatgagggcttcctgctctgaaacttcacttagttttgggagttctgttccaactgcctcttggatttgctgcagaatgtccaatactggatcacaactaaaggcagaatcctaaatgcccaagagttttagcatcaagtccactgtataagtctgatataaagggaagagatttagaaagagccatgaacatgggaaagcaagggaagaaatgcatcagttagggcttcatacaatctattactgcttttgcttgtttccagaaatctttacatttcaaacatctgccataaacactacatattttctctgcaaatgaaaaaataattattcttctcagctttctgaagataaaagaaaaatgtttgatttacttggcccattctttcaaaatagattataaaacaaaccacaatatcctaaggaatataggaaatagttatagtaacttttttgagcaggacatgataaactgacagaggaataaatatcatataaaattttccctcacctcacatgaagttctctttattcatttgtcacattttaaattttgttttcatgtggcattgtttaatgcatttcaactattcataatcttgaaaagtttcaaactcaccatgcttgcccaaaaatctacagatctatttctcaattaattaacaatatgaaatgaatgtgaaggctctgactgtaaaagatgaagacaagccaggcagtggtgttgcccacctttaatcccagcactcaggaagtagaggctcgtggctctctctgagttcaatgtcagcctggtctacagaatgagttccaggacagccagggctacacagaaaaactcttgtcttgaaaaaaaaaaaaaaaagggaagagatgaagaccaatcttaatcattctccttaatatcacctggcctccaattttgagcttttctgataattgtatttgcatatttaaatgtggactgtgtctttaaatgatttggggtcctggtgaaagaaagtatggtcttgctattgcgaattgaacatgtaaggatttagttcctgctcataacagggaactcataggtcttaaccatgggttccataaagatgctgagctggagcaagtccccagacagtggctctgatgcctctagtgtttgtcctcaatggctgaatagataacataagatatccattttcttttgtgcattactggagatggtatagtgtagccagctggaagggctcaagctcaacaatcctggcctcagtttagactgagttctgtgactgaagtcccatctttcctgcctctcactgtctgatttgactggtttccttgggctgtcacatgaagaaatactgtttgccctttttctcaatttccataatttaaataccttgtatattctcatttgttaatcagtataatttatgatttttcagtgctgtagaaattgcacatttgtgtgactaatggatcttatattttctttcttatagtctgtaagtaatcctggtttgcatatatttattataatttcatggagattggtacagggctagaaaaagaattcccattgtttctgcacaaaaagtttctccttgtaaagtaaaagttgaagggaatttctttgccatactcatgagagtcagtgtcactgttctttgaatttttttaattctaagcttgatatttatgatagtttaaacatacttattatttgtattttatgtgtataggtgttttgcctgcatgtatatttgtgcatcatatgtgtgcctggtgcccatgaagactggaagaaggcatcagattcaatgtgagaggagttacagaagggtgttagcaaccatgtgctgggaatcaaacccagatcctctgtgagtacaaccaggcctcttaatggctgaccacttatgaagattttaatgccaggaattagatttagtacaacttttcaaacaatatatatgtagctttttctttaaaaacaaaccaaaaaaaaaaaaaactggttcttcacactctatttacttatttattttcttttttatttaaattagaaacaagcttattttacaattcaatcctagttccctctccctcccctcctttcttgccccccccccccccgagaatctcatcccctttcatctccccagggagggtgaggcattccatgggggatcttcaaagtctgtcatagcatttggagcaaggcctagaccctcccttgtgtgtctaggctgagagagtatccgtctatgtggaatggactcccaaagtccattcgtgtactagggataaatactgatccagtaccttattctgaacaatttcagactttcagaaaagttaagtgtagaacataaagttttcaattatgcttttttcatatcccctgaatttgaacatttcccatttttctatcctttccatttccacagatacatccttcctacacacacacacacacacacacacacacacacacacactcatgccccaatgtgcttccatttgtttatttattttgctggccagagcctacgaatgctcccttttggtattttgggcttgcttacttgtaacacaaataaataaaagaacccagagacagattttgggttcaagcttcaagctgaagatcagaaaagcaaagcagatggccactagctgcttacctctacctcaggctgaaaggcaatcctggctccagaaaacctcagactgctgcctctcctcagcatggctggagaatcctgagatttcttcctatccccaatgtgggtggagaatgaaagccagctctgagaccctgttcctgccttaaatacctcttataagtcctggtattaaacatgtaaaatcccaggtgctgagatcttgtttatgtgagctgtttctctttaggactgggtcaatttcatctagttcagtgtggccttgaactaacagagatccttctacctcttaatcacgagttctgggattaaaggtgtatgcctgacttctatggattgtggctgactttgctttctgaatcctcacgcaagctttaataaatcataaaaaaatatatcaccatgcttactcttcctctaacacccctcactgccctggagctgcctttccatcatgtttctcacctctttgccagcttaactcaaagggcatgtgtttcttcttatcttctcctatctcttcatttcaacagctgcctagatttacaatttgttagacctgtggtctatctttcagacactaataaattatccttaagcttttatttgagtcatttcttctattcttttattaaagatcatgaatcccaggggagcacactgtttctataacacataataactctggttgtattctctcaaatttgggtgaagtacttgttattattaaagttaagaatggaagggaaattgtaattaaggatgagagctaacctttgatcattaaaaatggatgatgaaaaattgatggaaaggtcatgttggatatcagtagggtctgtggaatggaaagattatggaaatcactaaaggttagatttctgtagtaaaaatgagagagggggaaaaaagaaaaggaggagaagaaaaatagatggcttatacctaagaagatgtgggtctccttctcctccagatcattggccaccaccagggcaaaaagagcagaagcagcaagcagggtttgggaagccgtggagtatgatggaaagaacttcagggagtcagcttcagaaagacagctaattttttggggtatataagggttcttagggttatgggatagtagggctgattggtcatgacacagtacctaatacaagggggaggaaagagccagacttatatgacctgtatgctgagtcatacagcatttgcagggaactctgttcagggtcatcctccatatagggtcaggcatctgagcttagagacactctccaaataaggtcaatggagaagaggaagccctgctcagaaagggagtcctccattttgtgatgagctaacacagctatctggacttggtggactgcaaccttaatagcagcattctccaacagaaaattgagtagtgtagaaaaagattggatacagaaacatgaagaatagtcataagacctaaccatcaaatataaaaaccagagaaggaccattaaactatatcacacagaagtgatgatacttgaaaataaaagaagtaaaagaaaagcgaaatgaaagtgctacagataaagtacaaatgccagtacaagcaagccagtacttctgttagtgggatgagtttgaattttgagtcctgtaatagagtgcactcactgggggaggtgcaggttgcaacttcagttcagtcttataaaagcagactcctggatgggcagcctcccagtagaggtgaagcagattacctttgttctgaatttattgacacaggtgcttttagcatcacagtgtgctttgcagttgccatgccatctctcactgaggtagagacagggcccatcacaatgtcctggaaatggaaacttaaggttaggctaacagccacatgccagcttctcatccactgtctatactagtcctgtgtctctgtgcccccgtgtattcagtccttggtcatgtccctgccaaaccaagcatttgcttacaaaatcatagcaacctcactaactaatcatttcctctttgctaaatattagaggtgactgaacacattctaaagattggatgctcaccagaccttgattgatttttacaatctttaaaacaatattttaggtcattgaaactcattagcttctttttactctaggccaatggttccggtcagttgattatctcagtagtatattctattcatttcctgtacttcttcttagagcttatgataatttaaatttttatttgtataacttattaattaatgtagcctctcaattaatatcctagaactatttcttgagactgaaccaaaagaatccaacatgattgctagaaaatagaaaaggctcattaattattgtggaaaaaatacattggatgtgagtatttcttgtcctggaactattatgactttttccacctgagaaattttgatttctattaactaatatactgaaaaatgcttatttaatagtttttattcattatatgctgttttcttggtataagaaaattttaggcatacctttaataatattgcaaaacatttcaaggatatcttcaaagttgtaactatgatgcaaaaagcaaaaatggacttctatcatgtgacttaaacgctgttatttgcaacctgcattcaatctacctttcttctttcactgctgtgtcaaataccccatcataatttttactattttttatactgcatagcaacagagggcagtagaatggaggcacaaagtattaaatgcaaccaataaataatatcccaaagattttaaatttattaaaacatttttgtatttggtattgcatattctctaaatccatatatatatatatatatatatatatatatatatatatatatttcaaatgtcaccatttttcctgtaaaatatgtgttatttcacacatgagtattaggttctcagttgtgtaaaaaaatctgcacaacttaaaattaagatcagaatttgtgagtaatggataaatacaaccatctcaacaagtaggatgttttatgaatatgtgcctgaagaactggtagattttcatctgatggacatgtaacccagagaagcaggattaatgtgtattattaagatgactctaatgtttttagaatttacaaaacaaaactaaggagaatataaacagaaagacctcaatgaataagaaaaacttgtttaaggagtacaagcaaactgaactcagcaacaactcagatagacaagacaccggatgtttatttgtatatgtatttatttagcttagtgacatgttctcaacttcttttcttcatgatttattttattctttgagaattgtacatctgtaaaaaaggaacacaattatattgatcaatattccccttctccaatttctcctatagtccttcaatatatccccattccaacttcatgtcttcttcatttttaaaaaatagcctactaagtccaattagtgcttctcacatgtgcatgagtgtgaagtcatctactggactgtgggaaacctaccagtgtccgaattctcaaaaaaaaaaaaaaaaaggctctcctcttagtagctatcaattgccagtagcacctcagtaaagggtggggcctgtagaacacctccatcatctatccttgagtattggctgtgcagaaatttgattttgtgtaggtgttatgaaaatagccacagttgctctgaattcagatctgcaatagcatgtcatagccagaaaacatttcactggattccttcccatattccaactcttatatatttttcacctcctcttttgctgtgttccttgatccttgacaaagggggtatgggtgagggaggcaaggttggttaaagatgtcaaatttaaccctgagcacccacttttgaccagttcatgtgtcactgctttgactgaccactgaaaagagaatcttctctgacaacagttgagagtagcccacatcagtgaatataaacatatgtatttagaaagcaatttgaaagcataatcatttagcaaaacagcaatagcagattgtatgataggtagtaacctccccagccatgatcttttgaccagaattacagcaccagagatgaaattctctcctgtgtagcatgcctaaatcaaattggagattatttagttactccgtaatagttttgcccttgctataccagcgcactcatcttggtgggtaggctagtattgtatcatgctgggtacggagctggataaaaccgtcaatatctgttatacccatcagcctgcataatactttacagcattatgaaaactagcaagcagggtggaactgccctggttagtatgagatttatttttcggtatcttagagaaagtgccagaccttgagtatacaccatcttcattacctaaatgtgtaaagaaaaaaggttgagagcatgtccctaaactaaataaatacattcaagtaccacatagacacatatcagttaataggcaacattaactgtacaatatattagtacaacttagtcacccaacagtccactttaaaaaagatttgctgctgaggttgaaatgtaaaatatttcgccatagacccctctgtttgtccactttgtctccagcagatggtgatgttttgggagaccggacctttgaggaggtggagcattaaaggaggaagtgagtcacttctttgagttacatagtgtgctatacttctagtttggtctccactgcatgttctaatgaagggaccagctccccatttcggcagccataacagcctaacacatgcttgcctgaccttgccttggtcactaggaggtcacatgcctgccttgtggcaagaaacatataagaagttagttggtggtgctatgctttatggctctgggtgtcctttacagaccagtgcacagcactgggaggacctatgggccataacaagcggttggccaatcaacacagggcaagccctccaagcctggaggcacaccagtcctgagcctgtgtgtacccctagacactccctttatgctgccctataagatctgggtcctgtggcttctcagagtctttccccagccatctgccatggtttagctcattaaacaattacaataaatcctcctgctgtttgcatcaagcttttgcctctgcctggtgattggggttgccacagtcctgggtagaaatccagggggcctgagccactgggagtctttcatttgggggcttgtccagcatttgcgaccacccctcacatgagtggagtctatcttggaggtaagtgtgtaccctattctgtctcgtctactgtctgctggcactatctattctgtaaaagcacttaaggttttcagtttgcagttgtcctggtggtcatgagactgcttggactgtgatccgtagacgtgcccagagggtcgaagactgctgccttagggaacaccccaagaggaggaacagaggcccaaggacgcttggaccctcctcagatagtttcaattacagctgcctggttctgccacctgtctacctggcttcattgccttataagtggcacagacagattgggttggtgtttgttcttttctgtctattctgtctctgtgtgtttttatcgttggttttcaattcaggatccaccatgataccccctttcattgagtcacgtggcaccacacaaggtaactttcttttttctgtctttgtttctgtacggtttctgtgtagcctggagggtcgaaacaggctgtgtgactgggcagttaagcaggtttttcatctgatctcttgcaatacacagtctgactgcctgcttttcggtgctggcttggcagatcctgacctgtagttctgtgtcagttttgtgttttcaggtctgctgtttttgttgactgtgtaaatgtaaaggtcctatgttgggttcactagtgaaatctgtaagtaggccttgtaaaaagggggacccaaggttgcccaatctgtaggagggggacttggtgggaccaagttgcctgttccatatgtaagggaacccagggggtcgcccaattgtaggggagacttggttgtggtccaagttgttccatatgtctagccatgtgaaattctgaataggaccctagtctgtgttactgtgctgtctgtccaagtttcacatttgtgctgtgtttgttaagcctgacgtctctctctgtccttacagccgatgcatgtggcatgtatgggtcagggttcttttcttgctgtcctgagcacgtggcgtgcagggcaggagttcctttgccatgtgccatgggttagagtgtgctgcagtgtggttcccccatctggtgagcctgctgttctgaactccaaccactgctgtggccatcctgctgcaggtcctagcatggtggcaggactttccttgccctgagcatgtggcttgcaaggccaccatttgcccggctttctctgtgctctacacacgtggtgtgcagaatgttggagcagggaaaccaccggagtctctttcccacccctgcattggtagaggctctgggatcaccagcagcaccgccctgcccccaggtctctgccctgagcacacggagctggggctggtgaaccatctggcctgatccggacattctaaagaaacagccttaaagttattaaaaactacaagaaggaatttggtaacagtttttatgttgagtgagaaatgagaaaaaatgtaagagactaaagtaataaagagggaaagggaaagagaaatttgtccaaataatgtctaagtgaatcagaggaatgaactaaaggtatataaaaagttatagaggtcaaagaaagtcgtagaaggtcagaggaaagttgtcaaaggtcagaggaaaggttgttaaaagtcagagaaaaatgtaaactatgtttgttaaaaagttctgtttatttctcaagtaatttatgtatgcttgttttaaaatgttctatctgtttcctggcataacctaagttctgttacaagcatacagctaaaacaaatggtgcaggttactgccattttttagttagctggccacgtggctggctagtagccattttgctgaagttgaaaaaagatacttggacttccatcttgactaaaggtgaccacatggaaattaggaggtaccatcttataaacaagtttttcaattaagatttaaaatgttaatgcttctatatatcacagaaagacattaatgtttgtgcttttaaaatattcttattaatatttcaatttagaatcatttttaagcaaagcctgacaatgtaaagttcttgttttataaaggctgctaatctaagacattaaaaatacaaattaatacagtttatgttttcaaaaattaagcttaagcaagcaactaaaatatgtacatgtagctactgtttaaagaatataaagtaactatatgcaatttaaattcaactgtgctgtttcaaatattttactatgttaaaaccagttatagtcagactgaaaattaattacagaaataaggccttacttagtcacctatgtgcttaaggcaagtaactagacagacagacagacctctaatgcttcagaaacctgaagaatatggcatttaaaatgttgttttaaaagtttataatatcagacagactgccagatcctgacagtgacccaaagtctccaaagaagattataaggtaccccagttcctgcaccttgatgatggcgacactgaccagtgaatgagatgctcaaatgtggcacctgctgcctgccatgacctggcccagactgtgaacaaagctgctggacactggaaaattgattgtaccccctttggctagacaaaaaaaggtcagtcttttccatgtccctcttccacagagagaaaaacctctcaccatataggcctggcaaagatcattgttctttgatacttctgcctccaatgctaatggagagagttgggtatggctgactgtatatggactggctcctgtcacattttaatagattcggaaactgtgtaaaatttaccattctcagatctctaaaagtattaatggttgtcagcttgacagcatcaggaagtcagttccacaagactatagtcagcatgttagctgataaagtagtgactacctactgttcagtcacaagctcaaggtttttaggtttattgtggttgtcatttaagtataagcttaaagggcttgtcatcaggccaaaggcacctctgtccaatccacacctggctctctggatggaagaaaaatgtacatgcttctaggccaaatctgtagtttttgctaggactcaaagttattaatatgttcctgctgtttaaatagatacccagatatctgcttttttctgcactgtgggtttcaataaataagtttcaacttctgttcccagtttaaacatgtcttaagcaggtttctgcttctggcagacatatctgagtatcagttgctgaatacagcctgcccctaaagaactgcgaatccttgacttgctgtggatgtgaaccagtccagctgatgtggacaccccctgtctcttcaacagagtctgccatccagctgcttccccattgcctgaattccctttttgcttttgactagcatttcagccttcttgtgtccctaacttcgtcccaaagtcagcaggaagtagcatgggaaagaatacgtcgcccattttccctggttgaaatgctaagtcaaaataaactcccttacataggggatgccaatatctctcactccctgatggggacgctggagatacagcaattccatgattgtaatctccaaaaagaaaatgggggaatgcagggaccagctccccattttggcagccataatacgtatttgcctgaccttgccttggtcactaggaggtcacatgcctgccttgtggcaaggaaccaatcagaagttaggtggtagtgctatgctttatggctctgggtgtgctttatggacaatcgcacagcaatgacgctcagagtatagcaaccactttgggggtgggggacaatgggccataacaaccgattggccaatcaacacagggcaaaccctccaagcctagaggcacaccaatcctgagccttcgaataaccctagacaccccccttatgctaccgtataagatctggttcccatggcttctcagagtctttccgaagccatctgccatagtgggtggatgaaaggccagagctaacatgggtttagctcataacaactacaatacagcctcctgctgcttgcatcaagcttttgcctctgcctggtgattggtgttgctgcggtcctgggcccaaatcctggggcctgagccaccgagggtctttcactgctaagttctgagaagatgatgggcttcagacacatgctcatgccactgagtagcttcttgttccatagaaattccactccatactagattttatcccttgaaatcataacctaaaacaaattgttcatatttttcttttggaatataaacatatgaaattatgcttctgattttattctagggtcatctttaacatagtaggtatttaaaattcattgtgaattaatacattgaaaggttcacttgaacaggaatgaattggctgattagaatttcatcactgtggagagactggaatattataggtccagagactggttaccttgtcttgagctagcttttcatcttagaaccactgccatgccagagtgattattaagtaaaaacttttgttatctattggcttagcagattcattggcttccaccaacccaaacactaagaatgccagcagatagcattttaggcccatagatttggggtcccatcttgctttactactgatacccacaagtatattttaaacttgccctgatatgattttgtttattccataaaactgtcaaacatcatgaaactgcctttatgtttaaacatggattttgggagtaacctaaatctttgtccctgggtcactgttactcaaaatgttcccagaaaaggctgtctcttattccctttaagatgagatctgtggtttttgagttgacagttcatgcaagtcttataatttccatttattttattgttgctgatgttgttttaatatcactagtgttattacttttgaaggaagaaaggaagccagagatcaacactgggacagaagataagtggaataaagaaatagataaagaaggaaagccaccaaagttagtgaaaaaatgaagagacataaaagtgttacagaacttccggtcacagtctgtgtccccaaaacgctgggttaaacaactaaaagaagagccaaaataatagttaatgcagaaaaagagaattagtcaatgtgtttacactgggaagagggacaaagggatctaatggctcccccaaactatctttggggttctaaagtatagtttgaatagtgggccaaggatattcacatctaatcacattgtctaaggactggtcccacttattattggccaatcagtgtttcgtagtgttgcaaatctctttcctgttttagagagaagagggttttgttctggctggcccagaattttctcctcccagcagagattcttggaggaaattgctatgccttgggcccattgttctatactctgatagctaatgtgtctctttgaaatgaattcatttctgtcaggccagttacaaaaagaaccaaacaggaagttaaaaacggaagaaaatggagggaaaaggaaaaagtcattggactttgcggtaagaaaggtaaaaggtttctcaaggctataaacacattaaaattcttagggctttatcaggctttttgtttgtttatttgtttgtttgtttgtttgttttccttggggaggtggtaatgtgtagatattccaatgttacggtcttagaaaagacttgtacatacatcagttttactttgaccaattagcgctctgggtttctatgaagggaccgaatctctaagtctaccaacaaagctgggttgctggaaaaggatctcaaatgagctgagccagtacagtgctgctccctggtggttctgatgtgcacagaggggctcactagtttgctgatgttagttcctctgttcattcatttggcacaagatgtttaactggagcaatagataaaacaatcttgaatttgcattaacaaataacaataatgtagtcaagaatatatgtaaaaaagctttaacttactgccgtcatatcacaacagcttggagactacagttgtgataaactacgaggaaaaaatatttctaagcaatctgtttagtccttatttctcccaggaaaatgtagtttatttgcttatgtgcttataatatctattagtttatttggatgtaattgctgggaagttgatgacaggtcatttaataagagatgtaagatttcttgggtaattatcttctcaaccaaatacaaggctggtaaattaattcttctcattatttcattgcatttgctaactttccatgccttacaatgcatggaaaaatgtcaaagatcaaccttgtgcttgtggcaccaggaaggataacttccctctaatacaagtgtcatttcttctttttttttcttctgacaaaactatgaattggctccaatatcaccaatgaactaccattcttcttaggaaaacatttcattgtaaaggtaaaacacaaatttgattactgatttcctcatctgatggtaaagttgatgtggccatgaggccactagatggagatattgtcatttgtagaaggcagccatggctgaagggctgggtgacttatttttctgccctatgaataagaaaaattatatatgtcctctgtgacccacagcatacatttactgtcacctaccatcccccaacacacacacacacacacacacacacacacacacacacacacacacacacagagagagagaagagagagagagagagagagagagagagagagagagagagagagagagagggagagagagaatgagtgcatttgagtggcacagagcaaagctaaaagacaaataccatctcaggagttaataatggattggccacaacagagctacaaaataaattcagagagaaatatccagctcagagtctgacattgtaattacaggagtggagagaggtttctattgaagcatcaatgcattctacatgggtaggatggagtcataatccgatcagctgcaactgccacagcaacagacggacactaaaaataggccccctctggtaatctgtctggattactaaattcagtgatggcttggcaacaaatcagggaaatgtttgcggaaaaggatttaaatatatcatgaagttctatctgctttacagagaaacgcacaaggccctgattcagagtgactgcttcggggctgcttccaaacaaccaagctcattttgtcaaaacatcaccttgcagtcctgccttttgcaatttaatcatcttaaatccattagtgggggaagaaaaaaaaatagcgatttcaaaggggtacttctgatattggcacctacattatatattacaatcatatgggaaatatttagcattattaatgatgttgaggttagtaactaggagataatatggatttcacttgaaatagtagacggaaagacttgttcttaactgtaccaagatgcctgcgacacagtcacgggtgtataaacagaaagtagcttaatacttggcgtgtatgctaagtagtactgactggagagaaagacacttcggttgacagtgactgcagactcagaatttaaaatgaagcaatggtaagtattcttggcggacacaatcttaagcatttagggttaattactttgtgggctgtcatgacagtcttttagcccgtcattacaaccctttcgtcaacgtagccccacattctttttccaatccaggaaagcacttcagactgttctgtctttttttccccctgggtttggtactgatggttcatcctttcttcactaaacgctgcatttgcccaccttaaaaacaatgccaccctcttttaccctaagctgttcacagcaatgttgtccagaaatcagggagtaaataattaacaagtgtgaggggaggggaggatgcttcagagaatgcgggtaagcgttctattcagcatcttccttctgcttctgagatgactgaacccatcagatcctggcattcttaaaactcataatttaaaatgcaaaacaaacaataagtagtttaaaaatagcagctattctacaatgcacttactaaatacaccacagagaagtcacaaatacaaaaatatatttttgtccaaatttatgataaaatgacaacattaatgaaagccagaataatagcttgtaaagtttacaatgaatcagtcacatgtgttgaaaaatatttgccaaattctcttgctaccctttcaccttaactatgtagtttttaccattgatcaggtagtctttgaagttatataggctatgtgatgttttatttttaaaatattgcacggaacataacttttgatacctatatcgtttctttacctacctagttgtcatatgccaataatttttcatgatcctcagaaatttataaagttcataaaatgcagggatctctgaaacatcaactctatttagcacttaaaatatgtgtatatattttgaaatctttactttgagaggttgagaggttccttttgttaatcaggaatcatgtcctataattaacactacctttgatttaacaagctcacctagttttagagtcttatcattggaaattttgatagcagccaaagaaagtgcactcatcattgataggaaattatacacataagagacaggataatgaataatgagcaagtagtacaaagtataaccaggctatagaaattttcttaaacccttaattttcattttatttattatttcaaatttttttcttactttttgagacaaccatacttttgactatgatttttatcgcagcacactatttatgccttttgacaatgctttaattaatgataaaagctggtgagtttatacaacttaaaaatctgaggtgctgcagcagtaaaacaccagagcaatgtgatgtaatcaacagtgatgattttgtctgtatggttagtaaggcttagccacctctgaatgtacacagggaaacatccctctaaataaagcaacacattctaaattgtttgcagcagtagcttaattctgatgtttgttttttcactaaggtaattaaactcttaggacctgtatccaatccagaaggatggcattttggtgacttttcaagatacatcttactttaagtgttgttattactaatgctatttaacaccaaaaacatgcattgcttaggaataatcactgcttccttgttcttcactcatatggcaactaaataaagatgggttgtctattggtatacgaaaatacagaaattagtgaaaagcaaacaaagcaatattaggtacatatacacaaaacaagtttgtatgccttatgtggctaaagatgaagaaatctaaatcttcagtttaatgattgataattgcacagcatctgtaagagaaaacacattgggattgttttttaactaatatatacaagcactgctgcttttcctgtgcactagagctcttcctctgccttgtacagcatcatcatgatgccagtttttaagacagtatattcacttgttgattccattgtattttcttcatcacttccaacacttcttggcccactttccttcttgtaactgaggttctgtattttatagaaacaccatccagactccatgtgatgacaataccagaagcacagatgtttttccaaacctatactctagagtgcccatagcacataatctttggaacattttagccaaattaaattcacttgtatgtacagacataggctcatgctgaagtaaggtgatcataatgattgaagagatgagattagatttcaaagtttaaagttactgaatgtctatctagatcatttttatgaacagagtaccagggagaatcaaagcaataatgaataatctttgtccttgacacacttgaattttacaacaaatgactattttaaagctaaaaagaatactcgaaaggttatgtaaagaggaggaaatcagtacttaggcacccatgttcagggggtgctgaagcaaggtgacctgttataaatctcttctgattcagtttgtgcatatatccacaggaatgtagctttgtcttttcattgttacatacaggatcattaggatatccagccaatagtttggttgcacgtttgtgtgatcatatgaaagtgagaccatatctatatctatatctatatctatatctatatctatatctatatctatatctatatctatatctatatctatatctatatctatatctatatctatatctatatgtctcagtatattgtcacagtaataaaatttaaagttgtggtagtattatggacatgctaattcacaaccattatccccagaattctgggggctaaggatcacaaatttgaagccagtctggggtatacagcaatatccaacttaaaaatgaatatataattacaattttggtcctccatattcttttctctctctccctctcccttctctctgccctctctttgtgtgtatgtgtgtctatgatttgcctggggtgagatactcacacccatggcttatgtgtataggtcaaaggacaacttcatgtaccttaacatggggttcctagaattgaacttaagttatcagtctctgctttctatgccatcttcctgtacctcctaattttaattctctttaaaaattttaataatccatttaaaaactgtgtatgcagttacttcactcatttctgtgagcaaataactgacaagaatcaacttcatgaaggcaaacatttttctgcttatgattcaaggtacaaaagcagggaaggcatggctgcaggtgtgtgaggttgcttgctcacatctgggctgatccaggaacagggaatggaaaattcagatgctcatctgattttgtctcctgccctctttttctttttctttttctttttcttttaattcttggccttagcctgtgggattctgccaccatattcagtttctcccctctgtaaataccattagtgtcacacggaaaggtatgcctcactagtgccctaaataagtgggaattgaaaccattataatgtggaaggcagtaaagatctccaatgggaaaaatataagaaattatagtgaccttttaatgtttcagcaaaacaaattgtcctcaacttgtgtgtaccttaaggtatatctagccatatacctatactttaggtttgtgtttactcctaagttgactgtaacacagacacttcaaaatcctgcttaaatgatatgatatcctcatagtggtgtttctcattagaaagcaaattatctgactcatgttttccctgctcctagcttaaatattctccttgagttcttgacttatcaatccctcgtatgctgccttccaactcccaattttgagttattttttgttttgtatttttctttttgaatactgtctcacattataacttaggttcttctacaactcactatgtagcccagcttgccttggattctctgccctttctttccttggtttcttgagtactggaatgtaggtgtgagtcaacatagccagcaactgtaatgctttttgtctgacttggaactttttggtgacttgcaaaattgaagctatagttttcattttgaacctaatgttattttaaaggagccatgtgatgaattcaaatctgtggttagtcaacaggctcgacaacagttccttgttgttctttggcttttattgttagatactgaagacaaaatcaaaactatgcgcaccaatgtgttttctctttactgcgaaacacctgggtttagcactcttgaccaactaaagttttggtatctagaaaaagagatacacgatactactttgttacctaggtaacccaaaactttgtgactggaaatattggtttttgctaatgtcctagatttggtaatgtggcctatgttcaaccaggaacttcctcccagtgtctcaggcaatccccttctggtggaatcattcagctaataggatcctcagatttctagccatgtttgaaggtttgctgtgatttcaagccatacaagccacatctccagaattgacaagacacctcctttccaaaacagtaaaaaaaataaaaataaaaagcaagccctgatgtgtaatcacttttaagtctttatatggagcatattgacttacatctaagaagccaaaataagtaaaaacacatactaaaagcacatgtagagaattggaggtcatgtatttgtattggtaatctctgcttattttaatgttttcaaatttagtttgcattaaatatggagcactttttcttggttactgtgctgtgcatcttgagaagtatgtaaagtagacattccaacagaataatataaagtaagtgcctctaaattcgccacctaaattaggaagcaaccatattaataattgtcctagaaatacctcatgaagcaacatcattcattccattactgaggccaccaccctatcttttccactaaatcatttatctgtttctgattttgtcatgtacataaaaaagtggactttggtgacttgtgctcatattttatacatacaataacactatatatttcatgttgtggttttgtttatttattatcatttgtattgtgtacaacagctctctgactactcaccatacacatttccataggtcttataatttgatggatgtttgggatgctttcatgttttcattgttatgaaccatgcttctactagtttagggagcctagttaagagacatttaaaattaaaagttttagctaaccgaagctgcccatcatgtttgtgattggtagcgtatcatttcaaagatgccaatttctccagatcagtttctcaacaggccacctcatttctctctggaagtccttaaatagcactggcaaattcacacaccttaaagtcagtttgcatcctgttttctcttctaaagctctagagatttcccacttatcagttgcctcatgtgaccacttacatttaaaatgtaattaattaaagttaaataaaattcatattcactttctcagtggcatttagtcacatttcatgtgctccatagcaatgtgtgtacctacaacataggacaaggcagatagaaaggtttttgccttgtcctagcaagttcttttgggagcatcgtattctaaaaatgagtactagctcattccatttctttcatgcctaaaacacaccacccagaagcgctcttctccattgtcagtttgaatcctgtccttgccactcatctcttatttggtggtaacctcatattctaaaaaatagtgataatcatcttcagcacatttttattgatttatttttgttggtagactgtgtttatatgtgcaggcaatatttgtgtcactgtgataaagccagtaagaattcaggagactttacactggtttgaaacttgtgtgttttccaaacaggagaggaggaagaggttgctcctgggtctgcattactattttaagcttataaatttgagatatttcaatggtgaaaaggctatttaaatggcccaatccactgtgttcatgactagatgagtactgtcagaaatatgcccatctcctgcagatcaatttatagattcagcaggatttcaacaacttaaaggaagaacacattcgttttttgcctcatggtgtcagaaatttaactttgttttgggccagtggagggcagaatactgtgatggtggaaatattaaagaggagaatggcaggaaagagagaaaggtggggaggggagaggaagaaggagagagaaacagagtgagagggaggggagaggaagagggagggaagaagggagggaagaagagagagaggtggggaagcaaaagagcacaagagaacaacactcattcaaaggttaaggttctaatgtcttcttcaaggacacctttgccactaggtcccacctactaaaggtccattaccttccaaattggcacccttggctccaaacttacaccatactgcctttgggggcttttgagtttcaaacttcatctacagtgctatacattcttattatttatttttgtttgaggatacttaaagtgggataattttgtgtcgaataaagaaatttttgtcttcgtgttttttgtacactaccctgtctgagctcaatggttctagcacatgactaatggctatgtagccattcctgacttgcttttccaatgaaaatagctccctttagcagcaatgctctacagttctcctgctgatcttctttttctgtgaccacagtgtgtatacatggagaccttggaagaattgtggtgatgtgcccctccataactcctgtaagctctacttctctgtactaaactcccacattgaattcctgatggtgacaatggtggcaatctcttcattgactgtgtcacagtctattacttgtgtattgccgctaatgttaaataataaaaattgttaatgggttagtatgcccttcatatctgattttccaagttgaatttatatccgtcattattggccaaatgtcagaagttgatacatgccacatgtaatgtattcagaaagctttgttaaatgttggtttaaaagaatgggtagacttcgtccatttctcaacaactcaactgtccttgtcactggtaattccactggacttgatagtaatgtaatctgactgtctcctttatcattctggaaaggcagccagaagagaatatacttacagtctcaaaatatattctctgtaaaccatctccagtttattgttctttatttttccttcttctttttgtcttttatgacacaatatttcacatttcccaggctggcctgaaacacaagtggaaaatgtccttgaattcctgatgctcgtccctgtccacctcttatgtatcaccaggcttgatgttcttttgtcatagggacatccgatcgagggctgtaatgctagacagtcatgtcaccaagtgacctatatatccccagcatttaattgctaatgattctgccacatacatggggaaaaaaagatgcaactgcaatgtgctagtcagctattgtctatcactgtgtcagagcaacaaccactggaccaagttacagagaaaatgtcagggccgcctgttttagttgaagtttcctgtcccatgttgatgagatccagtgaatcatgtttcttcctggccctgttttgaactggatgctgtgtaggttcctctaaaactcagaaataaaatggaaaagcaaccaaaatagaggaaaacccagtggttttagagaatatgtgtttttaagaatgcataaatttccccagcttacaaatggataactagaagtttccagaggagcagaaagttacctttaggtacttagtggcatgtgattctgatcagtccagggacagcttcttgccagggaagttcttcactatatgatgtgtgcattgaaattaccttgttctttaacaagaatatcacggaaagggcaagcgtcagaccctcatttcctgctgttgcctgctgcccagctaccaagtttgattagtagaatcgtgttttcaaagatgctgtctcaattctcacctcatctccaatcgatcttgagctgactgaccagcatttggctgtagaataactacatcaggacaggctcaaatttttgtatttggtattaattttgtatactcaaacaaaaatgtgtttaaaattattctttaatagttacaagtcttgctgggcattggtggtgcacgcctttaatcctagcactcgggagggagaggcaggcagatctctgtgagttcgaggccagcctggtctacagagtgagtgccaggataggctccaaagctacacagagaaaccctgtctcgggaaaaaaaaaaagttacaagtcttggtattggttttgttttccctttattttctcctccacgagattatttttgttcaaagttatgactttgtttttgagagttttagttttgcaacatttaaaatattcttttaaaataaactttactactaaaaaacttgcaaaaaaaatcacattggaccatttcctattggacagttaaaatggtcttacaggatctagaaaagaggaagttgataagtattaacaaatgctatacacatacacacacacgtatatttctgtgagaattgtcagtgtttctttaatgttgacatattatagagtggatagggtatcagcaatttggagtggaatccttattgtagtgaagtgcttgtgatagacttgctgtgtgaacatccacaaacttttgcagtattattctgcagtgatagaagcccatggcttggttttatcagtgtaaccaagtttgtttggtttgtccttaattagtttatgtaaattgttctttgaaataatccattaaaacaatcaatacactacaaattgtgactctttcttatttacattcttatttagtaaagcagtttctctaatgatggcttccaggcaacattttattagcctagtgtgaggtcctgaacatactcaggggggggaaagatggtattgactttgacatagtcattaattcaagctacttccctttatttagtacaaattggggaagtttgctatacctgtaattcatttcccccacctcaacacacacaattaaatctcctgaatcatacctacacaaaaagcttgaaatgtcttccccttttgaaataccaacaggaaatagtgcaaagtgtatgtctgtgaatgtgactacattgagtctaacagatagatgaaacaagtttgtttctgccttctaatagacacacataatgggaaaaattaaaaatgcacataattttctgatataatcctgtccctttttagcaataatgtaaaaatatagagtaccttatgatatgaacctcaactttgtgtgtcactgttttgtatttaactgtggctgcatttggaaactagttattatgttatgccattgtacgggacttaaaatgttcctacctggttttgtgggctatatttacgtgtgtgtgtgtgtgtgtgtgtgtgtgtgtgtgtgtgtgtgtgtaaatgcagacagattaattttcttgctgtctaaagcccaattatatgggacaataattagtttcatgttatctgtttcactatttacagagcgttttcatggtaacgtggtcatcctaatatatccttcttttttaatttaattattttttagaggcactcatatttacatatccatccccccattcccttgcccttccatcctcccatgttcccccctaatccccccccaaacccatcccgcaactcctccccaaggatagtgaggtcctccactgggaaccttcaaattccatcatatcaattgggggaggctctaggccctccttgctgtatctgggctgcaatagtatccctccagagggaatgagctcccaaagtccatttgtgctctagggataaagactagctcctttgttagaggtcccatagactgtcttggtctcctagctggcgcccacattcagagggcttggttctgtccaatgctgtttctccagctttatgactagggtctccattctttcacttggtcaggtcaactgtttctaagtgtttctgcagcaccatcttggctcctttgtttatccctcctccctctccacaattggattctggagtatggtccagtgtttaactgtgggtgcctgtttctgcttcgaacagctactggatgaaggctctaggaatggtaccaaaatagacatcagtctcattataggggaagggcatcaaaggtatcctctccaccactgcccagattcttagttggggtcatccctgtggatctcccaacatttcccttgtgtctgacctctctccactcctctactgtctctctgtatgcctaattggatgtaattgctagttcagtttcaaatgtcctcccctttagcccttaatactaggagcacaaactcaggctgtacctgagtggcattacagtattaaactactcaatggaatagaatgttcctttcattatgagagggtagtggccacttttctcctttttctagtttccagtattacataactttaaattgtcatcttaactatgatcatggttttccgggttgtttttttattccaatctgatacaatgcagagtaacctggaaagaagaagtctcagttgaagatttgccacaactagactaatgtttgaccgtatttatgaggaattttcttgattaaaaatggatttgggaagactcctcccactgtaagtggcaccatccctaggaagtcagtgtgagattaagaagacctaacagaacagaagcaagagggagccagtaagcagtgttcctccatggtttctgttttaattcctgcttgaatccctgtcctgacttctctcagtgatggacagtgacttggaagggtaagatgaaataaacaattctctccttgaaattgctttgtgcagtggtatttatgacagcaataggaaaggaaactagagcaatggtgacactatgaatagacttctacataataatagatctattttcttcctacagccaacaacatctacattgcaaagcagctaaattgatgaacatagataaatttgatataacttttaattgtttttaattaattttaattttattcctatgtttgatgatggacaaataattatgaatttattctatatcatctatgtccttcagtatatatctttatatgtctacatgcatatgcaagtgactatgtgtatatgaacatgtgtatatttttatcaaggctatctgtctatcatctatctattacctatgtatgtatgtatgtatgtatgtatgtatgtatgtatctatcatctatttatctttcatctgtctgtcatctatttactacctatgtatctatgtatttatatatctatgtttctattggtctatcatctatctttttatctttcatctgtctctctgtcatttatttatctagctgatttccacaaaacaactatagcttatccagcaagttactactcacatcacttctggcacacttgacaattttctggttgctaaagagaatgctccctggaacctttattattaatgcgtgggaattgaaaacaaacagaaacacaaacacaaaccacaagtgcttccattctatggaatggtgatcttgtcccatcaggagtgtaagctgttgttttagtggtgatgatagactgtgctagttcttccctgttctcctggcatctgcccaaggtaagacatgcaatcttggcatcatgatgcatttcaaagatgaggtatcagaaccatctccatgtgtgacttaaggcctgtacccattgatattattctattctgctcattctctacctgtacaaagagaaagaaggcaataaagaaaacagcaaaaattgacatggagacaagaaagatgtcattttctctgtgtattccaagactattgttaggagagtttcaatcatttatgtgtgatgccagccaccattcaatgtgtcttttgcctttggagactatgaaactttgaaaatatggattatgtgttttgtttttcttttgctatttttagatcaaaatcacaaagcatggaagaatccacccaaccccactcatttgtggaatctaacaaatctgatttcacaaattataaggaatgataaggattacaagagggaaggggaaggatagagtgctcaataggtacagtgtaacatttacaaagaattatttcagatgactattacaaataagattaaccaaggggaggaattttgatgctttcaccacaaaaaaatgatagatacttaagatgagtaaaggacattctaaataccattatttaatcattatacagtttgaatgtgtatcaaatatcacaaagtatcttataaatagatgcatttattatatgccaattaaagtgaaatgaagtgaaatatatacatatcattagacaggatgttcttggtatcttttaattgaatgaccagtgtttttgttaggcacaataaaaacacagtaatcaacctagtacctgccaaacaaacaccgctcataattacctttgatgatgaaaaccaaggcaaagaagctagaaaaaagaaagaaggctagttctgatatagtgcttaatggcaactcatccattaattgccttgtttgatttcctattaaggaagactcagagaggaggtacacattcactggtggtgggattggttgattccaggtatcattagaaagagaacaggagaaactaaatggaaagatcaccttttgatcagagagcctgttaccaaatagggacatactgtgactgactctcttaattccattacagaactctagaagacatacaataacaaatgcttcagacttattagtctaacaggcaagggaactgggtctactgatgtattagcttaatctgttcagacagctatagcaaaaaaccatgagctggaaagcttttaaaggatagtttttcttttttcttagttatggagaaattctagatgaaggcactaacaaaatggtgtctggcaaggaatcagtgcctggttgatagaagggatgcttttcatattaacctcccatggaagaagtgataaggaatctttccttggccacttcaatagtacattaattccatccatgagagctatgctgtaacaacctaatcaatccaaaacccacctcctaaatacctctattttgagagttaggttttcaatatatggcttcttagagaaacatagatgccaggccataggctttacacctctcactagggatgttttgacagatattaatctccaaacctaaaattgtctaccaaagacaacaggaagtagtagtagtgtgagttgtcccatgcaaagtataccccattgttaagtattgtttaagaaaaaacatatgtttcactgacattgaggctattattactttcaattgtgactaccctgggagaacacaaattctggtttctatgtttaggcacaatacgtagtaaaaaatgcagatatgctttagttttgcacaagatacctttaaatgtcaataaacattaagggttccagtaatgaagaaaatctgagaaattcctaactatttcttttaaaagctatgtgcattcttgcaagtgacctgttcatgagtaaagaccatagttgtgtgagtctgtaggaaaagacagaacattcttcagatattacttatttaaaattccataagcaggagaaagttcatgcgatcctgtatctcagtaaaagtgacaaccacaaaacagtatgtcactgtaactttttcttctgctaatagaatagagttttatggaaattatggccaaaattgtctccatatcatctttagtcctcaaatggtctagaatgtcattgttggatccagaacaaattcccaattcctcctctgtccattctgtttggattaaacaggaagtcttctggctgaaatagtgccatttttacagtcaagattggactatcatgaacatattttttttctgtttagctttttattaaatcagtcaaagtgacatatttttacacagtatgaacatatattctgtgacatttccccccttttgtctaaataaaaaagaaagattttaatgtactaaacctataaacaataagaacaattatcagataagaattacattcacaatgtccagtccagttatacttgacaaatttaaagaaaatactctattatttatcttatgttactctgtctgtttctctctctcccaattttccacatctaaattgtatagattttattataagtactaaaatagatttatatgatactaaagaattcattgaaaagcacaaagatgattgtatcaaagccaataaaaatattttatcataatcatattacctatagccataattttataaagactattgaatcataccttaagtgtagtttcatctctctctctctctacctatctacctccctatccatacctccctacctatgtatcatctatgtatctatctttgtatgtgtctatctatctatctatctatctatctatctatctatctatctatctatcatctgtcaatatccagaacatgttagtagagttctgatgttatagatttttatcattctcctgtttgagtcaatttcttataacagaaactgcttctctttagttatttaccccatattcttcatcctttttcagttgccagtgtgtgtgtgtgtgtgtgtgtgtgtgtgtgtgtatgtaggtgtgcatgtgtatctgtgtgtatgtctgtgtgcctctgtgcatatatgactgtgtttatatatatgcttgcatatttgtgtatctgtgtgtatttgactctatatgtaagtgtctttgtgtgtgtaagtttcagtgtgtaagtttctctctttctctctctctctctctctgtgtgtgtgtgtgtgtgtgtgtgtctgtgtgtgtgtgtgtgtgtgtgtgtgtgtgtgtgtgtgtgtgtgtgtgtgtgccagtcttccccctttcacagttccttatttcacagtggtcttctggagtatggtaggctatgacacctctatgaatacacccatgaatataaaactgcctagtgtcagattagaactgatacctagagttgagaaagtactatttcaatcttgtaatgggatttcctcagaatggtacataagaaaggaaaatggatttcatttcaagacaggaactcactgtacagcttcagttaggacaagtattaaaatctatttaagtcctgagtagagaagtcagaagaaggaaagaatgagtgccatgtacaaaggcccagttttgctatatgtccacacccagaggaagggtaatggtgcccttcagatattttctgattctggattttctctcattagttggcaaaatgatatggagagacaacaagcaaactgatcaatgtctgaagtactcagatttgaaaagctgtattattatgtcagggtatgggctgtgcagctcatgtacatatatgtaaaatacatgtgtacttaaatggagttagacaaattctctgataggcagacaaatggagagatgggctatgaatagataaagatggtgaaattccaagattaaaccaaaggctcaagagtcttttttttttctcctctgctggtaagttccctgctggtgagtccactgctggtggagcagtccagcaagttctaggtcagatcagggtgtgtttgcaccaaggttgtggacctgtcagcctactagcctttctgtatattcaaactgacagacactaaacttgaggaggaagattccccccccaagtcccttaagacccccaaccctcaaagagaagtgctgattcagtgtttcatgttatgagcagagagtctttgctgtttgtgtatttttctcacccataagagaagccactttttacaggatgaggccgtctactgctgtttgctgcatctgaaattttctctgctgctacctgttgtacttatattttcctacatttcagttctttagttggcaaagaaatgaacctgatcaatatatgcattgaaacccatgtatacacaggaagagatcagccactgggtttagtaagggaatgaagaatagtatcctatgctcatgtcactactgtatcttactgatggcatgtctcctaggcaccagcattttcataaactgtgattgacagcaaatttcagtgtgacttctctgatttattttggtttgtttaacctttaaaacctttggggactgtatttcagaatttgctttcttcttctctgattgcacttctactttgttataattgaaattagtattttatgacagtggtatgtatgtatattttaaagtatgttaatgataaaacattatttaatctaaggtagattgaaactagatatgatcctacttggcaagctgctcaggtatgaatggaatctcagggcttctctatcagagtcattaacatggtttctgtgagtgtgaatgttcattagcatattatggaactataatttctgctttttcaaaaagctgcgcaaagcaattaaccaggaagataggaaccctgttttaatttcaacaccctatctagtttactttctccccattgctcttctctgcacttgtgtatgtttgagtgtgtatgtgtgtgtttttgcagcatagatatttttcctgttaatgttcttgaaggggagtacacatatgtgtgcatgtgaaagaaagatgatagactcacattattcttcaatcacagtcattttatgtttggatgaagttttttactcatctagagctcaccaagtaagctgtgctatctggacaatgagcctcagagttctgcctgtctttacttcctaggcactgggattagaagagtgtgctatcacactcagctttttacatgggtttcagggatcaaacttaagttttcctacttgcaaggcaacaattttacccagtgtgctatcctcccagcccaacagttcactttaaaaaaaagttgcttgttttttccttttattgaaaacatattatttctatacaatatatcctgattatggtttctccactttcttctcccattccccagtttctccctaactttccttccatccctaaccagatccactccctttctgactcttattattaaagagcagacttctaagtgataacaagtgaacatgacaaaataaaatacaataagatgaggcataaactatcatattgaatttgaatatggaaaaagaacaagaggaaaagtgtcccaagagtgggcaaaagagtcagagacccactctttcttatatccaggagtcccattaaaatactaagctaaatctgtagtaaatacacagatacctggtgaagtcccttgtagaccataggtttgctgcttcaggctatgtgagatcatatactccttgtttagttgattcagagggccttgttctcctggtcaacttcattccctctgactcttaaaatctacactggattccctaaactctgaatggagggatttggtggagattttccattactctctctacacataacatctgttgtgggtctatgcatatgtttccaactgctgcttgaggaagccaatctgatgatgactggataaggcactgatctatgactatagcagaatagcataaggagtgattttattgataattttgaacattaccataggtctctgggatatctagtttatggttcttggttattctaccagtgttaggtatggattccttctcatggagtgggcctttatgtcaaatcagaccttacttggctactccattaagttctataccatcattgccctagtatattttgcagacaggacagattttaggtcaaaggtttgtgtctgtgttagtgttcaagtttctctttcattagcctgcagattaccttcctacaggaaaaacactataatgtagggatgagggctccatataggcttgacttctccatgttcagtgacttgtgtgtgtgtgtgtgtgtgtgtgtgtgtgtgtgtgtgttgtcttcaccattggggcccctctgtcagttttcagagagcaaccatttgttttagcaacagcttgggttgtttaggaatttccatgagttcctcttggccaacaactcatttgaatacaacccagtcctgccactggaagcctcacctggcaacaagaaatgtacagctgagacttgctatccctattacctaatgagcagtcctcattaggttaggaatgttttctttgattttattgaaaatattttctgtgcttttaagctgggattcttctcctaactccatacctgttcttcttaatttggatctgtttttatagtatctcacattacctgaatgttttgtgtcagttttttagatttgatattttctttgatgaatgtagccgtttcttcttcatatgtcctcaatgcctgaaactctctcctcaatctactgtattctgtaggtgaagctgtcccctgtagttccttcctgttcaaattcctaagtttttcatttccagaattctctcaatttgtgttttctttattgattctatttccattttcatgacttgaatgttacttgtttcctttaactgattctgtgttttcttggctttatttaagcgatttattcatttcctcctgttttcttttttgtttgtgttttcttacctttctttaagggatttgttcatttcctcacatggtgcatgtgtgtgtgtgtgtgtgtgtgtgtgtgtgtgtgtgtgtgtgtatgttatcctgggtttctttaagggatttattattttccccctttaaggagcgctatcatcttcatatagttagttttaagttctttgtcttgtgcttcagctatgttgcaatgttcagcctgctgtggtgggatagctgggttctggtggagacattgcgctggatgttttcctggcctgctaagttggtgtgttcacagggaatgcctgctggtgctactggcatgagctgggggaaggaaggttggaggagaagttctttgtgattccttggagatggtgtcatatatgaaagggagactgtagcagatttcctgtcacagagctgggtatgaaattgggggcattggctctcaggagcagcaggacaggtgtgggcctacttttagcctatttgttatcctgttagcagggagtgcccaagctgggggtgtgtggtttgggtctagaccaaagcaacaaatgtggggtggaaggttagaaggggaagaactgtgggattcaaaagagatgggagcaagggttaagggaaggctgctgggggtgttctgctgtagagctagggatgagactacaggattaaaacctgaaaacagaaagagaagagaagatctataggcagcctacctgtttttctggaagatgtggcctgtaggttagttagcaggggttccttgtaggatatttataacaagcctaagctatagagtgagctttcataattaataagtctctgtgtcattatttgggatctggctggtcagacagaaaaagactctttaggagttggaggatgggaaaaagcagtgaatgaggggagggaggttagaacgggaagatttgtgggatcaacaggatctgggaggagtatggggaggaacagcaggaaaggctgcagtgggtgttctgctccagagctagagatgagcctgtgatgacctctggttcccttctttcaaattaatggcccttattgttacatacatatagataaatatagaaatataacttgttgaatccatttagtgttgtttgcatgtacatttttaggaatgactacttggtattggataatatcagtttagaggactgatttgcaaactaattctccctctctccatagtcattaattacctgaagttcttcatctaggggtagagcccagtgagaatttttttccccagccatgatggtagtttgtatatttgtttagtcttctttttcctttgaaaccttcaactttggtctgcttagtttgtatatttgtttagtcttctttttccgttgaaaccttcaactttggtctgcttttattaccaattccagccccaaatgccttcttcccctttcttatgagaagacattacaaacacctttttgctcctcttaccttatgttttttcgccctgagagccctgacagaataatcttaggctggagtaggctccatagtgggagaaagaaaacctaccatttccagcttgtgtaactaccattcacaagtgggaggggaagtgtagtggctgagtagtagacttataataaatatgtatttaatgagtgcatcagagtatattccctaaggaaaattgatatacaattagaaaagccatatttttcattcatatattattcttatcccacatattaaactagatttaagacagaatttgaggcagatacctgtatctcactaaagccattttttgaattgtattaggtctctcagagcacacatattcctttcttgaaatgaaatgtttactgcaaattcactggtcttttcccattgtttttgttttcctgtctctttgccctggagattattattatgctggatgctgaggcatatcaacaaactttatgtaaaaattaatgcacatgcttaactggaaaataaaagctgctgtgatttcatggacactggacattttctcccttgcttacactcaccctctgattcttttcctttaatgcactcttgctagaattgcttgatcaagggaagcgtgtctcttgatgaaaacagactgttcctcaaagagcaaattaaagactctcagtcctaggaaggtaaaacactgagttcatcacgcagtgctgtaaaacaaatgtgttatgtgcctggcaactctgccacacaatcaacaggaagcctcagattctgagatgggctgttctgcacattttcatcaggtacttgcaaatgcaatcaaaataagccaataggattcaagacaccttttcatgactcagcctcttggattttttcccctttagcaaatcatttatttcgcattaaatgaatgtgctgcatttttaaaaacatttgaaagtccatagtgtgtctgagatcagaagagtgttttactaagaatcacctctcaagtagcagcctcatctaatgaaaagaatggaggtttggctgccaccttatcccttctgctctctctctcctttctcatttatcctactttctgttttcagtgtttctcgttttcacatgttctcctttctttacattgcagttcaggttttatgcacagtgaatgaatgcttctaaaaaataaagacaaacaaatacgggtttcttggcaaatcacttttaatcgttcaccaaacatagagagatgcaattatgtgctaacatctttttgtgcacacgtggttttcagtcaacaaaggtccatagtgaaatgtggccctataaaaacacacctacaatttatatggctatttctcaaatacagctctgttattctaagcaaaatgcaaacaaactccctacctcacattgttcactaaattccatgtattaatgaaaagggtaaacactcaataatttaatttaaattttttatgtgtacgagtgttttgcctgcatgtatgtctatgcacaacttgtatgatcagtgccaacagaagctagaagatggaatcagaccttttgaagctgagttacagatggtagtctgctgccatgtgggtgctgagaggtaaatctgcaatctctcggaaggggaaccagagctctttaccatagaaccatctcttcagcccataaataatacataaaaatttacagaatgtgcagtgtctggaaaaggaggtaaaaatttacactaaactcttacctttatgaagcatggaaaagaagatttaacaacttattttattactcattttaaaatttaatttacctgaatcagtgctcatgcactcatattttaaaactcagtttagatattcatgcatcagtgtaaacttttacacagactgagaggtgttcttgctttatgatcggtttgtatgcaagaatctattccattgcttgtagtgttttagagttgcttggatacaatgtaattctcagcctttctgatgaaaaagtaagttctatttctgcttttacaaacaggttatagttgatgtgtgtctttctgtgttcctttgcaaatcacttggggcccttggaaaacttcagtgttcttatccaatatatccatctgctagagacccagatgaaaactagtctgttggaataaagtaaaatttgacattcacttggattgggtattttcttataattcccaccctaattcctacattgacccattagtcctcaaaatctcaagagtatgcccttacttaaaataaggtctttaaagatataattagataacatatgaataaatttggtccctaatccaatatgatggtatcctgtaactggggtagcactggaagcgagacctaaaacagcttctaatcagggtcccatagctctacaagtgcattcaacagaggcatctacattaggattgtagcacaatacatatctgtttgtttcagctacactgtttatggtattttttatttatccttaggaaataaaaataatactgttacttgggtcatttatctttttaatcataaaagcaatgtatagagctttttaaagtagaaaatataagtaggaaggaaagtcaattattctatagtctcttaaaaatagcattaagaaacaaggttgggataaagattagaacctactgacttaaaactgaacagaagagaccttgtccctttccctttctcgggggtccatatatgtctctcttgggggcctccttgtttcctagcttctctggggttgtggattgtaagctggtagtcctttgttctatgtctaaaatctatatatgagtgagtacataccatgtttttatttctggattatctcacacaggatggtttcttctagttccatgcatttgcctgcaaatttcaagatgtcattttttttttttctgctgagtagtactttattgtgtaaaggtaccacattttctttatccattctttggttgagggatatctaggttgcctccaggttctggctattacaaataatgctgctatgaacatagttaaacagatgtacttgtggtatgaatgagcatcctttgggtatatgcctaagagtggaattgctgggtcttgaagtagactgattcacattttcctgagaaactgccatactgatttccaaagtgactgtacaagttttcattcccaccagcaatggaggaatgttcccctttctccacatcccgtccagcataacctgtcattggtgtttttgattttagccattctgacaggtatgagatggtatctcagagttgttttgatttgcatttccctgatggatgttgagcaattccttcggtgcctttcagacatttgagattcttctgttgagaattctctatttagatctgtaccccatttatttaacttgtgtatttggtgttttggtgactagcttttgaattctttgtatattttggatatcaaccatctgtcaaatatgggattggtgaagatattttcccattctgtatgctgctgctttgtcttgttgactctgccctttgccttacagaagcttctcagtttcaggagatcccatttattaattgtcaatctcagtgtctgtgctactggcattatgttcaggaagtggtctcctgtgacaatatattcaagagtacttcccactttctctcctaagaggttcagtgtggctgggtttgtgttgaggtctttgatccatttagacttgagttttgtacatggtgatgagatagggatctatttgcagtcttctacatgtaagcttccagttatgacagcaccatttgttaaagatggtttcttttttccattgtataattttggcttctttgtcaaaaattaggtgttcatgggtgtgtagattaacaccagggtcaacctatctgtttttgtgccaataccaagctttttatttccattactatggctccatagtaaagcttgaagtcagggatggtaatgcctttggtagttcctttatggtacaggattgttttggctattctgttttttttttttttgcatataaagttgagtattgttctttcaaggtctatgaaaaattgtgctggcattttgatggggctttcattgaatctgtacattgcttttggtcaaatttccattaatatgttgatcctaactaagattatttcaattttctggtatctttttcaatttctttctttaaagacttaaagttcctgtcatacatgttttttacttgtttggatagagtcacccaagatattttaagttgcttgtccctgttgtgaagggtgatgtttctatgatttctttctcatctcatttgttatctatatagagagggctactgaatttttttgagttaatcttgtatcctgccacattactgaaggtgtttatcagctgtaggagttccttaatagaattttttgagatcacttatgtaaattatcatatcatctgcaacaatatctcctgagtaaattgggagcatgggggggctgagggaggtaggagaaagaggaggggaaaaagagtagggggaggagaacatgagggatcagcaaggttgagttgagggaagaacaaagaaggagagcaaggaaagagagggaaccattatgggattaaggagaaacctggcactagggaaattcccaagaatacacaagcaatagtgaagaggctacctcaaatgctcttcccctataatgagattgatgactaccttaaatgccaccatcgaatgttcatccagtaactgatggaagcagaagcagagattcacagctaagcactgaactgaactcctggaatcgagtcataaagaaggaagaatgatgagcaaaggggtgaagaccatgctggggaaacccacacagttgacctgagcaagggggagctcatggactccagtctgacagctggggaacctgcataagacctaaccaggccccctgaacatgggtgtcagttgggggacttgggcggtttatggagcctctgacagtggaaccagtatttatccctagtgcatgaatgggccttgggggcccattccctacggagggatactctctgcctagttacagtggggagaacctaggtcctgtttcatttgatgtgacagacttagaggaacccccaggggaggccccaccctcccttgggggtggggtgggatggggagatggttgggggaatgggaggactggagggagagggaaatgggattggtatgtaaaataagattgtttttaatttaaataaaaataataaaaacaaagcaaaaactgcataaaataacagcattggtgttttgtgagacaatttagaatgataatttttcttcattgggtgttaactttgaacccaagatatctctgtgaaattcatgaataccaccagaattcctgggagctctaatcctgatttcagatgctgaggccctctaagtaagtcaagtttcaaacagccagtttaccagtgagtgtgcagccgcagagtatggaagattttagttgttttctgggattgtgagagccccatactaacaacatacctggtcagttaaatgaatcaagcttttaaagcagctgacaatacaaaagcctgatgcaattctatgcctgagggtctaagaatgcatctttcaaaatgaagtacaaaaaacccctaggctgctagcaacctctacaatgcaaagcaacaaagcaaacaactacagagtcttaagaaaagatgatagaaagagaaacagagtacagcaggaatatatggaaacttaatgaagtgcattaataaaagtagttttgtgggaaaaatgacatttctagattttaactatagtttcaaatttaccttgactgtgtatatatcagacaacacagtaacaataacttgaaccttagatgcatctgttgcttttgcagacatttaatttatcatttaatatttatatacctttatcattggttgcaaatctgaagcttgaaaaataaagccatgtgtcaaagagaattgttatctggaggctggattgatcagtagtaagggtagtgtgactctaacaccaacaaatttaactgtaacacacaaaaaataaacgacccagagacagatattggagttaaacttcaagcagaagaacagaatagcaaaagagctgggcactagctcttacgactacctcaggttgaatggactgatcctgctgcctctcttcagtgtggctttagagtcctcaatgtggttggagaatgaaggcctcctatcctcaaagtggctagagaataaatgcctgatactgagaccttgctcctgtcttatatatatccctaatgctgggattaaagctgtgagattccagatgctgagatcatctttctgtgagctgtttcttttagcactggtttgtggttatatcttgcttatacaaaaaaagcctatctgagggtcagagaatggagcttgccactagctagccatagagctctccaggtctgtacagacagacaggaagtgaggtagttgggcagaattggaatataatcagggagacacaggaaatctctctcttgtctgctgagacaccatggaggtaaggtgtggtggtagtttgctccttctctttgatctctctgcattttgctcaatatctgactctgggtttttattatttagacaaattaaggactccttttacattggatcaatcttgtatagatatgggtggccttggactcacagagattgctctatctcttaatactgagtcctaggattaaagttgtatacctcctagtacctcctagcttctagctgctgggattaaaggtgtgtgcctagcttctatagcttgtggctgactttgtcttctgaatcctcaggcaagctttaataaatcataaataatatatcactacatttaactatggctactttagcagaatggctctgctaagagttttccatttcagtgggacaacagcgaaaagttctgtgtaatgtctacaatggttgattaagctgatcagctattcagtacagtactggcatgccaagggaattccatttttcaccagaaaccagaaatatggtcaaatattgaatgtgtatttgacatagtctgaagtatgtctttctcttcatggttacatccatcactatttcagaaaatggaaagttctctaattcataggtgtcagtagctaatgaaactgctttgaaaatctcctttatgtaaagttatctctacaggccaaagctttagcatacccagctaccagggaaggggaaaggaaaagacaaaatgaaagggggagggagggaaggaaaaatgaaatgaggtctaagattaggttatataaatcactacacacacacacacacacacacacacacacacaatggaactttgtttttgctaccaaaagttactcattcttactgagggaagctctgccaatttggacacctgtcacagttttgctgtggtaggtattattagacagggatgctataaccaaactgtttcaacaatgcttgtagcaaacaacatttgctaagcatgctttgtcccaaagaactgtatatagccttactttgtcttatttgacgaggtggcaaataattttatttaaaacaagtgagaagttggtgtcagtatgttgaatttaaaaacagtactcttttaacatgttctcaaaaattccatagataagaaagcatgtgtgaaagccacatgtagggtggttgctagatatagtcaaaagttccccttacaacaatcactcacgggtcaccttgaagatgtctacatagaacaagcatgattcatagtagtgaattttgattgtttatttctctcaaaaatcataagcaatactacatttaaaatctacattattttgtttttttccacctgaacaagaaggaaactgctaccctctgaatggtaagatactgtcagcctgtcttaccatgtcaatatcaagaccatgcacccaagaaagggtgtggagtattttcttattggaacctgattcttccaaaggattagctgtctaaaatgaaattatccaggtagatcccatacaaagaagctcatacagtgacatgacatgtctgggaagacaggacctcacctgctctttagagccttgagagtacatatgaacaaatgacccggtataaagaggtatgtaaaagaaacaatctgaatatatatatatatatatatatatatatatatatatatatatattgtttctgtatctttatcggattgtttctgataaagaatttcttagaaacacaatttgaaataatagatcccattaaaacattaaaatgttttggtgaatatgctcagagaaatgagatattgtattattgaaatagcatagaatatgattttaaatggttcaactaaagcaagtgtgcacttggaatttaaagagtacatatggagcaataacagaaaaaatataatagtaagttagtgatagccagaagctcctatctttagcatagcagacaaagaactggaataagtgaaaatagatgaaaattgcattaatgatgctaaagaagtactacatgatctaaagttcattgctggagattgggtgataatgctagaggtctagagtgcagattgaacactatgtcaatcatccctataacattataacaaaatgtttagcataaagaagtccctggggggattggagagctagccccgaagttaagagcattggccactcttccagaggacctggcttcaattcccagcacccacatggagactcacaatcacctgtaactcccgttctagcagatacaccaccctcttctcaggatcattgggatgcatggagtacatatacttacaagcaagcaacacacacgcgcgcgcgcacacacacacacacacacacacacacacacacacacacacaaaataccttacaagaaataattcaaggaaggatttacaggttcgtgttagtctttgataacctggttcccttctccttgcttgttagtgaggcagagcatgatggcagagagggaatggtgaaaacaagctgagcacctcttgatgtccagtgagagggttctaagagaaaacgggcttaggttcttgcctctagggaccaacttctttcaacaatgacctctatccttatagcccattcagccattaattcatctgtggttgaagttagtgccctcaactaccaatcaccttttaatagcatctgccaccagctcgtggctaggactttaattcataaacttctgggatatgttgttcccaatttatagcaaatatttagatgtcagaaataggacagcattgctgagatgtgagcctttgcagaaagacagagcttgctggttttatgtggagatatcatgggtgaagtgtgactaatttcttctattaggattaggtagttgatattgtcttctttttttccttatgaacagtttaatcatttgtacaagcagaataatgggaggattttgatcaagaagttctgttcaatatctctagttagaggagagatgaaatatttttttctactatatctctttaaccttacctatttgtagatctcttccttggggacatctgatttttttttctttcttgaatcacacaaagttttctggaatagagttttattttctaaatttttatttatcattgacaatttcataaaaaatgcaatgcatttttattacagctgtagcacaaataataaaaacccaaagacagatattggggttaaagctgaagatcaaagaagcaaagtagccaacaactagagagttttcacctttaataatgctcagatcaaagggttgattgtgtcctctgattgtatctccaaactgctagagtgctctggcactgcactgagctcctgccttacattcctatatagtgcggggattacaggtgtataataccagtgctgggatcaaaggtgtgagctctgtttctcttttagactgatttactctcatgtagctcagtgtggccttaaactcacagagatccatctactgttgtcttccaagtgctgggattaagtgtgtggccaccactgcctgtcctctatggctaaatagtggtttaggtatgtggataactagttgttattgtgagtatgtggctaactagtggcttatccctgcactctgatcttcaggcaagttatattagatcataaacaaaatatcaccacagacaccccatttttcaacacttcccagaccctgtgacccaccccacaattttaaaataggatttttaaattttattgagtgtatatgagtgttttttctacatgtgtttatatgtcccatgcacacaccctggtacatgcagagaccagaagagggtgtcagatctcctggaactggagttacaggaggttgtgaggtaccgaacatgggtgccagaaactgaaaccaggccctctccagaaactgctcttaaccattgagtcattttgttagcactccatctccttgtttcatgtgctcttttctgttttactcagtccaatcagtgctgcttatgttaatgggtatagtgccatattcacttaattgtgagcaatctactatgggttacatcattaaaaagaaaaactgactgtgactctctcatccatggtagccatcaactgccaacattttctcagttaagtcattctctcacaatttctttccctgtcaattctggaacattgagtagtttgttcttatgtatggcttgtgccagtaaccacagctgctgtgagttggagagagtaattgccctgttatgtagtagccatcaactaacaggtttcagctaactagctgccttcaagtgtagtttattgaagtacaagaaaggcaaagagctttcataagcaaactgcctgtgagtatctagtttttactaaattaaattccattccataatggagacttttgatatgaggaagagcaaatggttcctctgaagtttctataacactagaatgtgaaataaattggttatgatgcttaatctaagttgtcaatgtgattggattatgaagtatataaaagacagtaagacatgcttctggaattgtatgtgacagtgttctcaaggaggggtgaaaatggtggaagactggttcttaatgtgacttgatccctaaatgtaataaaagggggaaaagaagaaagtaagatcataggatctcctctctgattcctagggccatggtgtgagttgttgctctgttccagtataccatccactcaatgggagactggaccctcttaaactataacacaaagtaaaaccattcatccttatgttgtctgtgtccagtatttgtcacagagatctggcacaaggacaacaggtggattaataggacaaaggacacagaatttactaacctgtacaaattggagagtcatacacaaagaataggaatcaaagtttggccacatgtttgaaacttgactatcctctaaagagggaaagggaatcaaatatagacatttttaactgttgttcttagttatttttatggttaatgaatgggcacaaaaacaggtaatggaccatgttgtaatttaagaaaagtgacactgtggcagggttcaagcagagggtttttgtttttgtttttgtttttttttaattagggaaagagatcataaaaccaggaaagggaaggggatagactggcatctggagacaggagcagcaggagtcaggagagaggaaagacggggagagaagaagggagagagtagaacagaaaagaagagagagaaggatgtgaggtgggcagggccgttttaaaagagaacatagtgagaatacaggtggtactcttagtggctgcagctgagggcatatcctgtcagaaccccaaggataagccagtacagaagcctgattactaatagaccaggacaaaggtcttccaacagtaggagtttaaacttgtcatattaatggaatttcagtaaacagactgagggcaactgtgttcctttgttttgagagtcaacgatagataaagaaaagttgtgcatagctttgtccagcacttcagaggaaggatggagagatcttggatctgagacaatgtctggggcctctcagttatcccacaagtctctgagcattccgttcctcagccccagcagaaaacaccagcctgccttttgccctggacaattactgtcttcaaaggatgtctcttccagacccaccgttttttaatgccattaaattcctgagtgttttacttattgatgttgcctctatcttttcctgagggtatttgaatgtctgcattttgagttaaatggatataatagtttaagttcagtttatttaacctgatatataggtatgttctattgcctctccagcccttgggttaagacaaactgcaaactttaattgtttggaataataaactatttcactaagcaggaaaacgtaccttggcaaaaacacctcctgttctataggcaccaggaaagtctacatctagtttactgctcaaggacaccatctagctcagcttaagtagaagagcaatgtcccttctttcttggtctgtctgacaagaatgatttacacatgatgaccaagagcatatatggaagtatggacactcccatttatatggatctattgaggccatgcaacttctgattcttgggacaaatgatatttcagcaaagggtaaggagaggaggacagaccctcatagtcaaggtatttggggtgattttgcaggaagaaatgtcttacaactgctaaggcttactttgaaagcttgcatttttctccatgagatttctaatgctgcttgtagagtgctccaagacagaccctttccacctgaaatccactcaagactttcactactcttacactttcttccaacaggaccccacaaggccattgtcgttccagttcatcaggaagtaacttggagaatactacaccccctttccccattgttgacactaaggataatgtacacctagttagggctagtttcttattgtttagtgttgggtttggaaggaggtgttcaggcttggacatctcttccagatgactttagggtttagatggaatagacacagttaggatgtgatataaatagattattatatcttcttgtaattcaactttatgattgttaatttagataacttacactgttaagtttaaatcctctttaaactaaaaggggaattgtggggagaaaccctaattagaggtatcgctgaccatgttcaagtaacaagggtttaagaaggagggaggcatgtacgaggctctctttcacctggctgagctgactaggaagcatttctgggtccatcctgttcaggtgcaaacctggtcattggctcccctgcctgagtacttttcaccaataaactacccgttatcaacctatttctgactctactttgtaatcatctatacctctagagcaagtattgtctataatagctttatcaggataagacagattttgaaaattcaaaccagaattactttgtcaaatggtattatgtctacctcgaatttcagaatgattaggaagcatgtataacagaaacataagaatgtttcatgggatgtactatagtaaaagcatgtattcttactctgaagttttttttttttttttttttttgctaaatttggcagtcctaaactgttgtggctgggatatgaagtgtacttagaggttcatatgttaaggacctgattcccaacgactggacgtattgacaggtgattgagtcataaaagttcttaccgtaaacaattactcaaatgatgagttcctggataaattggtctttaggaagagggttctggttggaggaggtgaatcactgtattgttggacatatcttgccccagatcacttgtttcccatgtgccataatgtgaacatccttctcagacacgtgatcacactgtcatgatattctgcttcatcacagccaatggttatagaatatccgactatagactgaagcttttgcaactatgagacaaatataactgtgaagttgtttactaaggcattcctttataccagcgaagcataactgataaataaatgaaaccagtttgggatatctgaagctggagataacatatctgtttttggttcaaactctgggaataatcagataaacaagaagggaggttctatttattttggagaataggtttggaaatcccaaataatgtcaggttggctcactgcttttggtcctgagatgtggaaacacattataattagaacacatggaggagggatgtctgtactcagagtaaccaagaagcaatgtatcaaattatataacatggtggaggtccaatcacttccgaacagctccacagaaagaccaagattgcaaaattagtcctttaaggtgaaatgtattcaagccagaacagccatgttgtgatttagctgtttagtcactaagaatctcagatatagtgaataaaaagctaggactccctctgttacacagaagccacttcttcagacctccctggacaatagtatataactcaggtccataacaatttttaatttattcacatgtggggaaacattcttacatctagtcctacccacggaaaaaccaattacagtgcacattgaatctagaaacaatcttgtcaacacagagcattcttgctgaagtaaaggtatgcaatatagaaacatgaaggaaagcattttagttcttactaaaacattgcacttttccccttttccttttgctcatgtttctggtaaatcagagtcccagccacagtgcatcaagtgatggcctaatcagaggctagagatggtctgaagtttgctgcagagtgagtgagaagctggcactaaaggcattaaaacatcttctagccgtttcacagttgattgtaatgattgttgattgtaatgatttctgagccattccatattatgagaaatgtcaaaatcagtattgtccaagaattgacacattcaagaaggagtatgcaggatgtgaggctgggaaagaaaccgctagttgtggacagtagctaatccgagagcggcatttttgctttgttagattgaagtggctctttatcactgccagccactccctactgctcttgtctgtccccttctttcccacatcatcacttcatattgattattctgactgcagggttttatttgtgaagtgctttgtcatttgtactagtagaaaggtcaccattcacagcacttccaaagtagaacatccctttattggcattatgcaaattacttttcactcatgttgtacaaggcagaggctgtcaaaacacttggccagtagccaaggtaaaaccaaatcttccaactgtcttcttcttgtctatgtctgaaacaaagtcccttgaaacactctggctttggaaggtacaatgttgttattgttcctgccttacagttttatcctttcttttttttttttttttttttttttgttcttgtgtcttctcttccatttcatcaaagaacagttatagtggactttgtaacagaataagttcagatcaactcatattttcccagtattgatgttgacccaaccctcccattccagaattgtttttttgttttttgagacagggtttctttttcttttctttctttttttttcaggcttaagtctaaactttttttacttttttttcatttttttatttgaattagaaacaagattgttttacatgtcaatcccagttccctctcccttccctcctcccctaccacccaccacccaacgaaaaccctacctatcatatactctttctgctccccagggagagtgaggccttccatagggtgtcttaaaagtctgtcatatcctttgggatagggcctaggcccacccccttgtgtcttggctcagggagtatccctctgtgtgaaaggggttcccaaagtccacacctatgctagggataagtactgatctactacaggaggccccatggatttctgaggtctcctcactgtcacccaccttcctgtggtctggatcagtcccatgctggtttcccagctatcagtctggggaccaagagctccccattgttcagttcagttgtttctgtgggtttcaccagcctggtctggaaccctttgctcatcactcattcttctttgcaactgtattccagttcagtacagtgattagctgtgagtgtctgcttctacttccaccagcagctggatgaaggctataggatggcatataagtcagtcatcaatctcattacggggggtgggtgtggtgggtggcatttaatgtattctctcctctgttgcttagacgattagttggtgtcatctttgtagatctccagacatttccctagtgcctgatttctctttaaacctaaaatgtctccctctattatggtgtctcttatcttgttttcttctattctttccccaactcaacatttctactccctcatgtcctcctcacccctcctcttctccccttgtcattctactagctccctctcccctccccccatgctcccaatttgctcagaacagggtttctctgtctctttggaggatgtcctggaactagctcttgtagaccaggctggtctggaacccacagagatctgcctgcctctgcttcctgagtgctgagatccaaggtgtgtgccaccaacacctggcacagaatatttcttttagtcatgtttaaccagtttaatgtggactaaagtgtggttctgtgggtttctttgaactcatataccttgaaatactacataaaatttagtggatgctgtgctgacctgaaccataaggagacctgcccaggcagggaggaactccctgagtctggaaacaccccactcttccttcccctcccctggatctgacccctacggaggcctaactccttcagagtgaggagactaccaggaaaggcaagaccatccagagctgtggacattgaattcctggcccccacacaccactgggtcacaagaggagatagagagaccccacatgcacccactggaagaagatatgggaagaagacagaataagaactcactcaacaacagaaagaccaatatgacaccaacagaatctagggactccactccagcaagatctgaaaagcccaacacagagcatgaagaagagatggacctcaaaaattatctcagcaatatgatagaggcctttaaagaggaaacaagaaaatcccttgaaaaatagaagaaaaagaaagcaaaatttacatgaaatggaggaaaagacaaaccaaaaaattcaagaaataaacaaatctcttaaagaagcaaagaaacccaagataaaacaaccaaacaagtgaaggaagctcttgaaacagttcaaagcatgaaagctgaaatagacacagtaaagaaaacactgaatgaggtgatgctggaaatggaaaggctggataaactatcaggaactaaatatgtgagtataactaatagaattcaagagatggaagagagaatctcagctattgaagactcgctagaagatataaattcatcaaccaaagaaaacctcaagtccaacaaatccctaacacaaaatatccaggaaatatggcacactgtgaaaagaccaaacctaagaataataggtatagaagaaggtaaagaaaaactgctcaaaggtacagaaaacatatgcaacaaaatcatagaagaaaacttccccaacctacagaaagatatgcctatgaaagtataagaagcttacaggacaccaaacagactggaccacaaaaagaagtctccctgacacataataatcaaaacaccaaatctacagaataaagagaaaatattaaaagcagcaaaggaaaaaggccaagtaacatataaaggcaaaccaatcagaatcacacccaacttctcaatggaaactctgaaagccagaaggtctggtatagataccctacaagcactaagggagcatggatctcaacccagactactatacccagcaaaactttcaatcactatagatagaaaaaacaagataattccatgacaaaaacagatttaaacaatacatatccacaaatccagcactacagaatattcagaaaggaaaactccaacccaacaaacatagctacacttacaaaaacacaggcaatagataatctaattttaccaaatacaaaaagaaataggagggcaaaatccacacacaatgacaccaccaccaataaatccaaaacaaacaagaaccaacaaacaatggacattaatatccctaaatgtcaatggtcttatcttacccataaaaaagatataggctaacagaatggatacgaaggcagaaatcatccttctgctgtatacaagaaaaacacctcaacttcaaatactggcgttaccttagagtaaaaggatgggaaaacattttccaatcaaatggctcaagaaacaagctggtgtagcaatcgtaatatcaaacaaattagagttcaaactaaaaatcaatcaaaagagttgaagaagggcatttcatactcatcacaggacgagtccatcaagacgaagtctcaatcttgaacatctatgccccaaatatgaaggcagccacatttgtaaaagaaacattactaaagctcaaactacacataaaaccacacacacttatagtaggagacgtcaacatcccccccttacgccactagacaggacctaaagacagaaatttaacaaataaacaaaggatttgacagaagttatgacccaactgggtttaacagatatctacagaacataccatccaaaaacaaaagaatataccttctcagagccacatggaaccttctctaaaattgaccacatagttggcagcaaagcaaaactccacagttacaaaagaattgaaataaccccctatatcttatcagttcaccatgcattaaagctagaattcaacagaaatacgaattgcagaaaacctacatactcatgaaaaatgaataacacccaattgcaccattcctgggttgaggaagaaataaaaaaagaaattcaagacttcctagaaattaatgagaatgtagacacaacatacccaaacttatgggacactctgaaagcagtgctaagaggaaagttcatagcactaagtgctcacatgaagaaactggagaaaagtcacattagagaattgacagaacaactgaaagctttagagcaaaaagaagcagactcaccaaagaggagtagatgccaggaaataatcaacctgaggaccgaaatcaataaagtagaaactaggaaaacagtacaaagaatcaatgaaacaaagagttggttttttgagaagataaacaagatagacaaacctctatccaaactaagcaaaaggcagagagagagcatgctaattaacaaaatcagaaacaaaaagaggatatgacaacggacactgaggaaatccagagaatcatcaggtcatactttgaaaacctgtactccacaaaattcgaaaatctaaaggaaatggacagttttctgtgtaaatatcacttaccaaaattaaaccaagatcagataagcagtttaaattgacctataacccctaatgaaatagaagcagtcatcaaaagcctcccaaccaaaaaaagcccagggccagatggcttcactgcagaattctaccagaaattcaaacaagagctaattccagtactcctcaaactgttcctcacaatagaagcagatgggagattgccaaactctttctacaaggctacaattactttgatacccaagccacacaaagatatgactaagaaagagaactacagaccgatatccctcatgaacatcaaggctaaaatactcaataaaatattggcaaaatttgaatccaagaacatatcagaaaaatcatccactatgatcaagtaggcttcatcccagggatgcaaggatggttcaacatatgaaaatccatcaatgtaatctaccaaataaacaaactgaaaaagaaaaaccacatgatcatctcaccagatgctgaaaaagccttttacaaaatccatcatcccttcatgataaagatcttggagagaacaggaataacaggaacatatctaaaaacgataaacacaatacacagcaaaccaatagccaacatcaaactaaatggagagaaactcaaagcgtttcctctaaaatcaggaacaagacaaggctgaccactctctccatatctcttcaatattgtacttgaagttctagctagagcaataagacaagaaaaggggatcaaaggaatacaaattggaaaggaagaagtcaaactttcactatttgcagatgacatgatagtctacattagtgacaggaaacactctaccagctgataaacaacttcagcaaagtagcaggatacaaaattaactaaaaaaaaaatctgtagccctattatatacagatgataaatccagtgagaaagaaatcagggaaacatcacctttcataatatccacatcaatataaaataccttggggtaacactaaccaaaaaagtgaaagacttgtacaataagaactttgagactttaaagaaagaaattaaagaagagaccagaaaatggaaagatctcccatgctcttggataggtagaattaacatagtaaaaatggaaatcctgccaaaagcaatctacagattcaatgcattccccatcaatatcccaacacagtttttcacagacattgaaagaacaatactcaactttatgtggaaaaataaaaaacccaggatagttaaaacaactctttacaataaaggatcttctggaagcatcaccatccctgacttcaagctctactatagagccatagttctgaaaacagcttggtattggcacaaaaatagagagatagaccaatggaattgaatagaaaagtctgatattaacccacatacctatgaacaccttatttttgacaaaggtgctaaatctatacaatggaaaaaagatagcgtcttcaacaaatgatgctggcacaattggattcggacatgcagaagattgcagatagatccatacctgtcaccatgcacaaaacttaagtgcaaatggatcaaagatctcaccataaatccagcacactgaatcttctagaagagaaagtgggaattacccttgaacaaattggcacaggagaccgcttcctgaacatcacaccagtagcacagacattgagatctgcaattaataaatgggacctcctgaacctgagaagcttctggaaggcaaagaacacagtcagtaagacaaaacgactgcccacagaatgggaaaagatcttcaccgaccccacatctggcagagggctgatttccaaaatatacaaggagctcaagaagctagccaccaaaacaccaaaacaaagaaattaaaaagtggggtgcagaactaaaaagagaattctcaacagaggaatctgaaatggctgaaagacacttaagaaagtgctcaaaatccttggccatcagagaaatgcaactcaaaacaactttaagataccatcttacactggccagaatggctaaaatcaaaaacaccactgacaaactatgctggagaggatgtggagaaaaaggaacactcctccattgctggtgcgagtgcaaacatgtaagaccacgttggaaatcagtatggcggtttctctgaaaaatgggaatcagtctacctcaaaatccagcaattcctatcttgggcatatacccaaataatgcaagttcatacaacaagggcatatgttcaaccatgttcacagcagcattgtttgtaatagcctagatgcccctcaactgaagaatggattgagaaaatgtggtacatttatacagcagaaaaaagcaatggaatcttgaaactggcaggcaaatggatggaattaagagaagccattctaagtgaggtaacccagtcacaaaaagactaacatggtatgtactcactcatatatgagttttagacatagagcagcgattactggcctacaatactttccaccaaagaaactaggaaacaagaagtactttaagggaaaaatgcatggacccctgagaatgggaaggggcaggaattcctgagctaattgggagcatgagagtaggggagagggagatgctataatgagaggaagagaggaggaggggagaagaggaatggagtagcagaaatattgaattggagaaagaatagaagagagcaggatgagtgattccatatcatagggagccattataagtccgaggagagatttggcactagggagatttccagagatctacaacgatgacacaaactgacaatctaggcaatggtgaagaggatagcctaaatgcccttcccctatgatgagactgatgactactttttgtgccatcctcaagccctcatccagtggctgatggaagcagaggcagacatccacagatacagactgaactgaactctggaacctagttgcacagagggaggaatgaaggtcaaagaggtccgtaccaggctggtgaaacccacagaaacagctggcctgaacaagggggagtacactgacaccagactgctgtctgggaggccagcacgggactgattcagacctctgaacatggatatcaatgaggaggcctctgcactctagggggcccctggtagtagattagtattttttcctcatgtaagaagggactttgagagcccatcctgtgtcttggcctggatacatgggggagtgtctaggcctggcccagcatgatgtggtggacttcggggagcccctgttgagggccctacccaggctggggagtggaggatggatggggtggagggcaggtgggaggttgaggggagtgttggggggaggggaaggagagggagaaggggttgacatgtgaagcaagcttgttcttaatttgaaataacacaaacattacaaaaaaactagctgtctactaagtatgtggtatgtaatcttgaattgaatgtgttcgtcatactttcacacatctattcctcatgtcacattgtgcagtataacaagcccctagtgcctagcaataaagtgtcatgttgaatcataatgacaggtccatttttattttggattctcatcaagaagacttttgatgtctccaaagttcattatgttctcttttctataccaaagcaaaaccaaaccaactacccaatatactgatagaaaagcaaaactcacaatgcttcaaagatatgtcacaattagaaatacattattggaattcacaaaatatgactcaaaattcaaactttgtctttttaagaagttattgagaaaggtcctgcagctgaacccatatatctaggaacagagatgttgggataagaacgaaggtttcagaatagctgtcagagaaatggacaatggccaggtattcacactactttagctatactgcagagtgctactaaagagaaattctataatgttttcaatcaacttaaacttatgcattgtcagtaaaatatatacaaaagaaatagaatgaagaacaagttctacacagttcatgacaccagaattaggtttgtcttaagtagttttcattgtagtgaagatttctttttctcttttttttttccatgaagctttaaatttttaaaatttctgtgaacccagtgaaactgagaagatatgtcaatataaagagacaaattacaaagcgtatggccacatgcatgtgtacattcaggcatgcacatgtgcgcatgcacacaccacaatacacacatatctattaggcaatggtaaagatattacaatgcaatagcattaattttgcagtaaggtcaaggcaatggtgttatcagcaatacaagaaggcaaacagagattcttgacacagtcagaattaagcactaataatgtcttctttcacatcttaattggctgtgatttgcttctgatagtacctttcattatcagtacagcagggtacctatgtgctccatttgaggtgtccaatactctaattatccttacgtgcaggccaccctctatgcatgttaagtaacaccagtaatgcattttgaaaagaagcaatatgcttaaccatataccaggtactctgccagcttgggaatacattttactctctagattgtaaagctccattactgttttgcattgataggcatttgtattgattggacggagaaaagtaagtgctcattatagaactgctggcagtgtaattatcaaatggcacccgtactgagatgtattcggaatcacagtcctccttaacaccttgcagtatgaaatactagtcatccagtggagtccactctttgttctgtaattgctcacaattagcaagtgagggcagcaggtatcctttttacttttccaaattctgatgttggcatatgtgcactgactgtatttactttcaaatcttaaattagctaattgtgaaaatattgtatcttatggtatttgcttctttttagagttagattttgtagttaaaggattcagtttgaatccaaaatctgctacacactaactttatgagcatagaaaaatatgtatctttttacctctcaaacatgtatttcttacctgaaaaatggttccaacggtagattttctggaatattttgagaaattaagcctagacacagagtaatcaatgtgtaaaaatgtggtaactgagctagatacagtgattgtggtctgggaatcaattcatttgaacaaaagtcagtttttcatgatggtctgtggcttcttcattactggcagagcaacttattcaattctaacaggcatgtgcaaagaagctaacagcttctttgtaactttaaatgcctattgtctgggttccccttgtgcatgttcttgaaactgtatcagctgaactgcccccacatcctgtggttggtattttattcctttttcaaattgcctgttttcctgtgagaaaatgtggaggggaaaggagggcatggctcatctcagactgcagcatctctggactcagtctcctgaatattttctctcctacaatcttacaaaaaagtgtgggtgtgaaactaaggtgggatatttgcatagtcatgtttagtattaacattttccttcttacagtctagacttagcactcttaacttagcaccaagagaggtgcctgggttgtcttttgagatgtcctaaatccagagccaagtgtcatcccttaagactgaagtacgcatgccacagccagttaaattcttagagatttggtacttttcaattatgcattgactttgatcacagatccttctgggatgtttggggaagagaaatgaatgataaaatattataagaaaagtgaacattatatttttgattcattgatagaatttttgtattcctttcataaggaaatctcccagtctcttcccgcaaacagaatagggattgcgcctaaatcttggaagtgtgtgtgtgtgtgtgtgtgtgtgtgtgtgattaaaaacacctcaactttctctctttctcttctcactctctgtttctcacacatacacatcccatttacacatattatacacatatataaacacacatatgggtgtatgtatatataaatatattgcttacagatgcatgtgctttttatgtttattggcctatgtgcatgcacacatatgtatacaagaccattcatataactgaaagagctttgttatggttttcactttagtgtgatgcctttctctgaatattgacaagatcttgagaacatattgatgtcaaaagacaatgtttcaagacctttctatctactcataccccacaatagctcatgtagtgagtcattctattcctagaaaagaattatcactcactcctttatcttgaaaggatatatatatatatatgaaaacatatatatatatatatatatatatatgaatatatatatatatatatatatatatatatatatatatgtttctgaatgttaacatgtttatgtgcatgtgtatgggcaggtgctacagatgtcataaaggggcataggatctcttggagctggagttataggcattcatgagccacctgatacgggtgatgggaaccaatctgcagtcctctgatagagcagtgctattgactgctaagctagctttccagtctcctagcttatttttaattatctttgcagactcacagttaatacatttattttcaagaatacaacagtgttatatttgaagggacatgttttaagcttcccaccacaaatattctgtaagcatcaaattgttatcagctaccaagcaaatattcatgtaacactttgtaagaaaacctatagatccgatagctattgttattgatatatatatatatatatatatatatatatatatattattagttcaaattaggaacaagcttgtttcacatgtcaatcccttttccctctccctcccctcaccctcacccctcctacctcaccccgacctaccccccaccccatccaccctccactccccaatgggggctccacaaagttcaccacatcatcctgggctgggcctaggcccttccccatgtgtccagggcaagagtgcatcccttcacatgggataggctctcaaagtcccttcttacaccagggaaaaatactaatctactaccaggggcctcctagagtgcagaggcctcctcattgacatccatgttcaggggtctgaatcagtcctatactggcctcccagacagcatctggggtccatgtgttccctcttgttcaggccagctgtttctgtgggtttttccaacctgttactgacccctttgatcttcattcctccctctctgcaactaagttccagagttcagttcagtgtctatctgtggatgtctgcctctgcttccatcagccactggatgaggattctaggatggcataaaaagtagtcatcaatctcattttaggggaagggcgtttaggttatcctctccaccattgcctggattgtcagtaagtgtcatccttgtagatctctggaaatctccctagtgccagatctctcctcggacctataatggctccctctaatatggtatctctcatcctgatctcctctattcttccccagctcaatatttctgctccttcatttcctcctctcctctcctcttctgctctcgccagtgtaatttctaacatgaatgttttctaatgaagattgtgtgagggctcaagagtttttgtaggaaacttaacataggaactatgtctttttcctgtcaccaacatatacttttaaagtttcccagttcagagaaaatgatgttgaaaatgtaaagagccaaagctgcaagcctagctcttaccaggccactgggttggtagctaccactaaaatgcacttctgcatgtattgtgttttgttcatttcacaccttcttgtttctcattctgaagccgttttcacatcattcaagagttccacacactgtgatgttttcctgcattattttatttaccaacttaaagaataagcatggacatgaggacagaagcctgtccactgagcatgccctctgaatgacataagcagacagaactggagaggaccagggggaaattctttgttaagtagccaaggtttcaggcacataaattattctgcactttaaacaattcaaatatgtttaactaatgaaggtaaaataatgaggctaaggtaacatcaaattttcaaatcacctagaccattccattcacagagcccaccatttgacttttcttttaaatggaatgactattgaaacttttagtactcagtttttccaacatgttttagggttcttgagtatgtagttattagaggagattattagactggcttaaactgttagaggatagatagacacacactggtcagcaattggctagtgagaccaggaaatcgggagttgctcaattccaaaagccaaaagcctcaaaccaagaaaaccaattacctggaccaaacctaattttaatggcttggaagtgctgtggaaaaccataggtccagatactcactcagtctgaagactatagagtctaatattcaagaggttcagaaaagaaaaaaaaaacagagaaatttgagcttgtgtattggaaacatatacacttcatgttgttttgagagtgtatccttcagcagcagagacaggtggagagacaagacctttctgctttactttctcatgttctgggaccagaggcccacatcaccacacctttttgttctgtgtggtatcgatgaatcctggtctcatgatcctgctatccacctgcagggcaggacttgcttccttaggtgctcagctctatgccaatcctctctggaagtgccctcccagggctacctagaagtgttctctaccaactcccttaacatctttcaatctagtcagctgatgaccagtgttaaccatcgaaacacatgcatcccataaacttctcagttcttctttttcttctcaatatcaagataaaacaggttctctataatagtatatttcttgagattctaaatttgactcaaatacttgcaaacacgaaacagaagcagaataaaaagaggaaaagagaaactcgaggtgtagttattatcttctgaattgagattaacccaggagaaaaaaaaattatagtgaactggctttctgtaaaacaaagttggctcccacttgtcctcacctcttacttctttgtcccttatttactgtacagtgaaatttgagtgaaggaattggcaaacagctaataaaacctttgatggtattaattactttctacttaattacctgccatgtggatcttgttgagctattgattactagcaaacatacatcccactggggatatatgtgatttaacttcattcgaagagtcaattagtccaagcaacagggagagccggtgcttcgcttcaatagctggggtttcttgccaagaagggttgataagccatttatttgttcattaaaacacactactattatcaacaggaggcacttacctggtgttattgagattggtaaaatgtcactccatgtcatcagagattagctgcattgtggggaaggaatgtggccatgaggggctaaaggaatgtgaacttgctagagtgaagcctagaggtatagccctgaccaaggtctctgtatgaaattataactaataaatcatgtcaaatatctctgtgatgctgtgtgtaaatatgatactttctgccccgtgacttctaggaaacaagtctttgcttccctagatcacaagggcatcatattttctgaaactacagttagtaacatattgaactggatgtattccagagaaagtcaatgggtggaccaagagcaaaggggaagaaaggagaagagatgcggggggagaaaaaaaaaaaacaaactattccactgtccaagtcttgacatcaaattttacactaaagatcacaagaaaattcatgaagatggcactcataacacttcttaacttcaaattatgctcactttttaatgtatgttcatgtatgttcaagtgactaaatatctgtgtgaacatctttctgagattgagtgacctccttaatgctgtaaatccattttcttgcaaattttgtgattgcatttttatttagagattactagtatttcatttgtaactatgtatcaaaatttcattatctatttaccttctgattgacaactaggtttattccagttctttgcaataatgaataaagctgaagtaaacatggggatgcatatgtatctatggtagggtatggaatttcctggggatatacctgggagtgaagtagtaaaattatctgatagttttatttttggcttttgagacatattcaaactgttttgcacaatagctgtattgatttgcacccccccacaagggcttctttctgtcaacatcttttccaacatttgtcagaattatttatgataaccattctaattgagataaggtggtatgtcaaagtggttttaatttgcatctttctgatgggaagggaagctgaacattttatgaaatagttattgaccatttgggaattttttgagatctgtttattcagcccatttgtccatctgctgattggcagttttaaatttttcaattcattttaaatcttggatattagctccttgtctgacatgtggctggtagccattttccccaactatataacttctctggctgttctgatgatagctgactttttattgggaaacagtctactaaaaaatggaagaaaaaaacccaaaatacattttaaaaatcatcttttaattatgaatttaaataactttattttctgtgaaatttaatactattaaataaatattacaacatttaatttcatgaatcattcatagaatctgtatgtgatgcaattgctatcactgggtatttgtagtctccatgtgagatacagtcactgtcatttacttgcttttggcaagttggaacagaggattaaaagaaagtttaagtaacccaacaggaacatctaatttctcaaattgggatttgatctgatgtttcttggattgaagtccttgtatgctctgttggtagtcctttggcataatattgcaacataaccctaaagacataatatcatctgttcagaacttatgtgattattaactcctgggacctgtttcagtgtatcttatagcctttttttatgggtatttcccctctctccttttttctttctctttcaggtgtccatttcattttccttaggtttctttgtgacactactacatatataattgagcaaatagatttacttccagcatatagatataattaaagcatttaaagtgaggacctcacagttattcaccacatatagaagcatgttcctttctattgaagcagggactctggcaggagaggagaagggaattcataattattatcagatctcagtgtctcgatgttattgctctaaaaggaactgccactgaatggcacaaacatcacatatcctcactgtccactatctgggaaatttttccaataacaatatgaatatataatgcctagttgaactcttataaaggtaacattttggactaaatatttcctgtgttgatattattttataatgtgtgaaaacattgtaactttcaaaagaaatatactttgttgtgtaaatgtgccacattttctatattcattcttctgttgagggacatcaagactgtttccaatttctggctattacgaatgaaacaaaaatgaacatatttgagcaagtgtccttatgctagaatgaagtgctctttgggtatatgcacatatagctggattgtggagaagttcgattcccatctttcaaaggaaagtccatgctgatttccacagcttctctacaagtttgcattcccaccagtaatggatgagggtttttcttattccacatcctcaccagtatgagctgtaaattttgttatatatagatcttagacattctgacagatggaagatggattttcaaggttgacttgcatttccatgatgaataaagatgttgaacattttttgtttgtttatcagccatttgaaatttctctattgtgaattttctgttcagatctttaccatattttagtggggttatttgtttttatgatttgcagtttcttgcattctttgaatatttcagatattagtcttctatcagatgtagagttgttaaaaatcttttcccattatgtaggatggtacttttattagaatgactgtgtcttttgtctcacaaaagcttttcagtttcatgaggtcctatttattaattgttgatcttagtgtttttgctatcaatgttctgttcagaaagtgttttcctgtgtaaataagttcaagactattccctactttcttttctatcaggttcagtttatctgattttatgttgaggtctttgatccacttggagttgagtttcatgcagggtgacaattatggatctattttcattcttctagctgcagacaaccagtttgaccagcaccatttttgttgaagatgctttgtttgtttgtttgtttgttttcattgtgtattactggcttctttatcaatggttacagacagggttgagcttgtctgaaatggttgcttgcaactagactcagtttgtctgtaatagattatttttactcttaactgctgagccttgtctctagccccagctttgatatttttacttaaacattaattatatacagcagcaagatattcacaggtcatagattacattttaaaggcactatagtcacaaatgttatcacaaagcaatttatttaaaaatcaagggtactctatataatcaaacactttaataaaaatatattcaagtacattaggagatcacaaaaagctaacttctgcttgtgcagcttcagtgaatagcaggatgctaggttagtgtttggtttcagtactctctaaatatgtaagtacaatttatttcttccaatggttcaaaacaaaaatgatcagagtgacttaactcatcatcatatacagctaagaaaaggaaacaaaatatttaaggttacctttcagtgcatgcagcaagcactacaatgccacaactgcgaagtgaaaataaagaatatagtgaactcagcattcaccacagccttctgaactttcttcagtatgatagagtactgtgaggcacagtgttctcagcagaaaggagaagtaggagcttcaaaatgtgccagcataaaggaggaactagtgtggaaagaaacagcagattttacataatacactcttgactcataagccaaatgtttgctgtctgttcatggagcaagactcttactgttttggcaaagaataactacatgggggatatgagctaaacataactgtggcaattacacagtgctgggagatgttgcaaaggatgtcctagtgagagaaagaatgtcagaaacaatacacatggctaattgtagtaaatgcttcttctcgtcctaagttttctcaacagtgattgttggtcaaggcaaagttacaacataaatgttctaaatatacgttgaggaaatatttagggaaataagatttctattctttactggaattggtaaaatgaggacaccagtaaattgtaataaggtatggatatgtagtgttatatcaagaaaaacaactaaaaataacatgcaaagtggtgtggtctaagtggtggtgaaaacaagaatggaattgtaaaaatgtttaagaaacatacagaagggaattcaaaaggaaagagagaaataaaaagcagaaatatcaaccagaaatcaacatcaataaaatcatttgtttaaacctaagctatcaataatcatgttaaacttcaatgatagagacacagcaactaaaaggcagaggttgtaggagcaggttgaagaacagaacttaaacacatgttgtctgttaaatgtttatttcaaacataacaacagagttgcctacttctgaactgtcagcctacaatgtttgagcttaggtttattacaaaatgattgtcattcaaaagaaattgaatactaattgtttttcagtctaaggatatatggtatcttactttcttataagtcctggaagatacagaaacaaaaatccatatttatctgcatagttataaggataaacaatgaatagtccacaatgtgtgtcttaagaaatgattttggtaagtttaataaatgtacttagcttcaggcattttacctaaaataggttcattaagatgataactgatcactgggtttttcttcacagaaaaatccagtcaagtttttgaagtttgtgatggcgtatattgactgtcaactggatggaatctgggagaaaagactctgaacatatctgtgagggactgtagagactatcttatctctgatgtgactgcaataaattctttagataaattttaaattctatattgacatgggaaaacatgaccactgttagtgtcaacattctgtaagctggaatcctggactacataaaaacagagaatgagaatgagggagagaacatatatgtgtatttttttgtgtgtgtgtgtctgtgtgtgtgtgtgtgtagtaatgtatatgcatacatattaatatcatcagtgatgaaggaaatggtgatcaaaaaccacaggaagtacaattataaatctgtcaacaggggtaaacttgtgaataacaacaacagaaaatattgccaggactgaagagtaaagtgttgctcgtacattgctggtcaaaatataaatgatacagtctaggaaaccacagttccttaaaagatccatatacgatttaaaaatcccatcatcccatatactcagtaacagtatgtgtactagagaaaagaagacatttaacacataagtatgtttgaatattgatagacttattcataatagctcaaagttggaaagtgcacaggtatgtttcaatagatgaacatttaagctttggtgccttaataggattcaatgctgaaaaacacttcactagcagaatgattggaagatcagaggggttgctgtgagattgtatctcctagaaatgccagaagagacacccataaagtttcaccaaatagactctccaaagatgagctgaacaattaaaatacctatggacataataaacaggataagggaaaagtccatgaagcctcagatttacacaaatctgtaggaagttgaggaaagctgggaattagagaggtggcttccccagaaaacaacatgccaattggttgttgagtgtcagatggtcaaccatgaaaacatatatacaagtaacactatgtggactgaacaggttatatttaggaatatgcatctatgtatgtatacatagatgcatccagtaaaattttaaaataggaggtcatcactttgaaggaggaagggtatgtaggagggtttggagggggaagggaagggatgaaagatttaattttattataatctcaaaaaattagtaaaatcccagaaaatggatttttgatacacacaactattgggattattcttctgataataatgttgactcaagaacgcaagggttgcatactatatgatcccatttatttaacattcttgaaaaatattaaagaatgaggattggattaattcctgaccatgatgcaggactgagctaggatgggatagaagttgcaagtgcagaaaggagcaattctgtttctttactatgcttgtgatactggggtgtagcatcacaagatgctgtcattggggaaaaccgtatgcaagacagtttgtttgcagtctttttaaaatactgcatttataatgatcttaaaacaaacaagcaaaagcaagcaaaagacagcttaaagcatgtgaaaggtaaattcaaacttcagaaaaaggtgcacaaatggtcaacaagctcataaaaaaataattgaaatctttgctcatcaaggaactgcaaattaaaactgcatctagacactaaaacatctaaaagattagttttatgtaacacacatagaagagtatgggaaataagcaagaaatgctaccatatacaaagactacatatggtatgaagctttatatattttcaaatcgaaggcactgtgatcaaattggttcagtagtttgcttttggggggactaaaactgaaacagaacactacatgtttgtagacttaacagaaaacaattttagattgtcatcctgatatgtacaactccaagaatattgtagttaatttaaataaaagccaagaaaacactaagaaaaagtaaggctttattatagttcaactcacttcataattatttttttcatttattttacacaccgaccacagttttccctccctccttcctctcaacccccacccctctgtgcctcctgtctaccctccccccatccaattctccatttccattcagaaagaggcagggcttccataggcgtcaacaaagtatggcacaccaagttgaggcaggaccaaactcctgccctgcatcaagattgggcaaggcaaatgcagcatggagaataagttccccaaagccagtcaagcaccagggacaggtcctaatcccactgctgagagcccagagaccaagttacacaactgccacataaatacagagggccgaggtccgtcccatgcagactccctagctgttggtccagagtctgcgagcttccacaagcacaggtcatctgtctctgtgggttcccccattattatattgattcccctggcctatacaatctcttcttcgtcactcctacaggtccctcagtgctctgctcagtgcttggctgtggatctctgcatctgcttccatcagttactggactaaggttctctgatgacaatttgggtagtcaccaatttgattacaaagagaaagcagttcaggcaccctctccactattcctagaagtcttaggtcatccttgtggatttctgggtgttcctggggcaccaggtgtctccctaacccccaaatgcccctgcatcaagacatctttcattattcttcccctccgtggcatccacaacctgcctaaacctacccctcatgttccagtccccactccctcatcctccactccccatccactgtcccctgtttatcaaggggatctttgctattcggtatttccagggaaatccatgtgtccccattttagccttccttgttacctagcctctctgggactgtggactgtagtctgttatcctttatttacacctaatattcacttatgagtgagtgcatattgtttgtgtttctggtctgagtttacacacttgggatgattcttcagttgaggagcatctaggttgttttcaggttctggctattatgtatacataacacagctacaatagttcaacttacttaaaaggtatcacttgtgcattgatgccttttaagttcctgatatagtagcaattgatttgccagctcaatgaaaagctagccatggctagactaatgttaagagttggtgataaacaagtattgtgatgaagccaatctcatattcctcttatgttctcagatatcaaaatattgctttaaaaatgagataatcatttgaatatgctaacacagttattattcaggaagtactgatttctataattgctaatgtaaatataaatctttactgttgattatagattaaaaccacctttttgggaataaaaaaacgtagtaagactagttctattaatgaaaatatcatcaaatgatacaaaattaccacaaaatttatgagaaaatctcagttcctaaaggtgcttcatttcaaaacttaagaccctgagttacatccccagaccccacatgggaagaagagaaaggactcactcaagttgtactctgaccgtcatatgaatgccatggaaagtaaatactcacaagagggcacacacacacacacacacacacacacacacacacacacacacacacacacaccccacatgagttaaaaaataaataatcaaaattccaagtagtgtatcacactgcttggtcttaataataagtcttaataatctggagtcagatatggggttaaatgctgacagatcaaagagataatggagcaaacctttacagcaacaccttaaatccttaaattctcagccaaaaagagactgagctcctgtctcctccagccttatcacttcgtctctctgccaagccatatcatttcctctctgtacagacctccagacctctatggttaactagtggctagctctgccctctcatcttcaggcaaagtttatttactagagtacaaacaagatatcactacacagtagtaggccacaattcacatagttctgacaatggtggacttttgttatgtttatacatattctgttgacaaaattccaaataacattggaaaaaaaaagaacaaactcctgttctatgtgaaattagttaatattaactacttgaatgttaggatcatagtctgttgaaataacaaacacctgggtcatcataattaacagtaattacctcttcttgattgaaaaagtatcagtttcaatattattttaaggtctgtcatggtccatgataatacaactatgcccttgttatacagaatgataattatcttcatctttacttctgcaagtggtcaattgtttaatacctgtaggagaaatataaatatatctagaagaaaataaaaatgggccaacattaattttcctcttacacatttgaatttctgtcatacttggtactggcaatgataccatggatatagactttacatgcatattaataaatgaagccttattttaaactcacagagcttaaaatatatattcatcgaagcaattgcagatgtaaagttaataagagctctaagagtcctgctactttcagcagatttttttcaatgagatttgaaatagttaataaaaagtcatacctcaagaatgatatctgaaatcagtcggcttctcacgtacagaattatagtacaatctcagattttaactctcccaagtagaacaatctcaaagctcagaaggaattcaagtgaacagttgggctgtttttttacagatttatttatttttatttcatgtgtatgagtttttagctttcatatatgtatgtgtaccatgtgtattcctggtcccccagaggccagaagagggcatcagatccacaggaactggaaggaaccaaagggaattgtaagccatgtggttttatttatttacttttaattaattaattaattttctcagcccagtcacattttcccctctctccctcctcgcctcttagtctccccccaaagctccactcttatcccccaatctacttctaccactttcacaacagaacaggcctcccttgtatatcaatcaaccatggcatatcaaattgcagtaacactagggactttctctcctattaaggatgaacaaggcaactcagtagggggaaaaaaagaatctcaaagcaggtaacagagtcagagatagctcctgctcccactgttagagtcccacaaaaagatcaagttacacaactataacatatgtgcagaaggcccaggttagttcaatgcaagcaccctggtttgtggttcagtctctgtgagaccatatgatcccaggttaattgattctgtggacttccttccttccttccttccttccttccttccttccttccttccttcctttcctctctcttttcttccttcctttctttttacatttgacagtcatatttggttctaaccttggtgcctgggctgtccagtccctggatcttggcccttcaggaagtgtctggggtgggctccctctcatggtatttgtctcaagctgaaccagtcatttgttggctacacccacaattgcttcaacacttttaccccaccccagtatatcttgtaggcagggaaaatagtaggccaaagattatgtggcttagttgtggtcctaatctctccactggaaatcttgcctggttattgatgtctggttcaggctccttatcttccattgccaggagttatagctaaagtcaccctcatagattcctattgcactaggtttctagataatttcagagatgcccttgattccagttgtcttttcagtactctctccattcatcttcccccacctgatacttcatgttcccatgcttacccctccatccagatcccttcctcagtctacctgtgatgtctattctatttccctatcacagtgagattcatgtgtccctcctagttatttagcttcagtgcgtctgtggattgtagcatggttttcttaacattttttgttaatatccctcataagtgagtatattgtagtcggcatttttgggtggctatcgaccatctccaaaaataagactctgggacttattaaccataaatgtttgaccttactgctttcccagctatcagtctggagaccaagagctcatctttgttcaagtcagctgtttctgtgagttttaccagcctgatcttgacccttttgctcatcatttctcctctgggtgtcagtgaagagaccttggaaatctatagggcctcttgtagtagatcagtacttatccctagcataggaatggactttgggagcccattccacatagagggatactccctgcacctagaaacatgggaatgggcctagccctatcccaaaggatatgacagactctgaggacccccccacccatggaaggcctcaccctctctgaagagcagaaagtgtatgggataggtagggtgttagttgggggcataagcgggggtggaggggagggagagggacctggggttgacatgtatcaatcttgtttctaattcaaataaaaaatggagaaaaaaattcttgaccttagcttaggcttgtctcactagctcttttaacttaatttaacctgtttctttttaatctatgttttgtctggatttttttaacttttgtgtgccctacttttctgctttctctgtgtctgtcttttgttcttacagactctctggcatctcattttcttcctttctttatcctaaatcccttatccttcttattttccctgcccagaagttctgcatataatctttccctcatcaccactggatggtttgctttttattagacaaatcaagtgccttaggcaggcaaggtaaaacagtaacacatttgtacatagttaaacaaatattctgcagcatgaataaatgcaacacatatttacatagttaagtgaatccaacacatctttaatagttaaaaatgcagtctacctttgtgtagtgttgcaatattttcccatttttgtctaaatcaaaagaaagattttacctttaacatagtaagaatatatacaataaaagcaattatcaagtaagaattacatttgcaatatctagtccaattacatttagtaaattcagagaaaatactcttatatatcctatcttggtgagtacaaaattatgtatccattttactttttgtcttaacttgtattctcaacccaaaattatatttttagacctcaaaaaatttccttagataaacaatttaaacatttatgtttcttaactttatgaactttacatcttttaagtaaatttcttttgtgaatttcataacaagaaatgctgtaactataacattacctgagtaaacaggaagtgcagagcaagcaacttccaaaactatagaaatgacagaagtaagtggctacctaaacagtcatgcaaggttcctctgtaatgttggggcatccatctccacactatggacctagaatatctgacagacttttttgtgaaacaggaattttcaaggactgtcataacttctcttggtaaatttggcagtcctttttatgtgtgtcctgctcatccagtatgtaggtggtatacaggggcagtttcttgaccaaatggctagaattgtaacaataaagcaaattctgtatagaagttcttcaatgcccatcaatcttttatgaagtagattgtactgtcaggaacagatgtgtcttttttgtttccaagacaggatttctctgtgtagctttggagcctatcctggcatttgctctgtagaccaggctggcctcgaacttacagagatctgtctgcctctgccttctgagtgctgggattaaaggtgtgtgctaccaatgcctggataggtgtgtcttattgtcattaaaatccttagattattaaacatattaaagccatattctgtaggtctctgaagtatttaaagatcatctatctatctaaaatatatttgtttaaccttggaaccatacctaacatgactacaagtttgattgttgtagatgactaactactaacctgtactttttaagtatcctaagcagtttgtaataatagcttccatggactagaactctataatatatttttaaatgagctgcataggttcaataccttaaaaaagaggatacatatatatggtatgacaaaaataactttaaatttgtatcaatatacaaaaattcatacaacataaagtatttgagataaatagttgtctttttaagcctatattcctatattcctgccagggcccataaaaatggctccacttcactttgacttaagttcagagagttcaaaaccattactgctctttcatggttaaataacagaatgtttggcctaaggagtaatgaatgctttgcgttgacaacaggatatttggtttatggtgtagttacttgatgttttgggtattgcaaaggtaactacacttgcttgttctttgtatctttgtgagaaagtcttccccccttcttttgattgggatataaaagatctttgaataataaacttggggtagatcctggtattccccagatgcattccagactctatcctgtgtctctgtttttctttagtatctttaatttttctacttgctctttctttatctacatcttccctttaagcactgatgaataaactgggaaagattcagctgttgttatttcctgtatgtaggggatgcgagggtatggcccctcaatgtggggtttctacatatccccactaactgatggtcgacatccataacctaacgaatgaccaaaaaccattcaccccacctcttgggaatgtgaatattatgttctgtagactgtttcttttgtctaggggtgataacatccttaggggaccctgagaatattgagataatgtttaagtactaagaaaactagctataaaattactatccagtctctgtgattgggaaaatgtaagacttatctgatgttctggctaaaatagtctgtgagtcttgaccttctgagttagcagtcttgaggttgttataaatacaaaactctgaggaaactgtaacagaggcatcctgaaaggctggatcaccttggatacctattttcattggtatctgattgccttcctctgaaaacacacaaactttcatccgggcgttggtggtgcacgcctttaatcccagcactcgggaggcagaggcaggtggatctctgtgagctagttccaagacagcctccaaagccacagagaaactctgtcctgaaaaaacaaaacaaaaaaaaagaaaagaaaacacacaaactttcaaaggcaatatgcataatttatattgacataattatggactatgtgttgtatgcaagccaatacaccatgtttgtctttctgggtctgggttaactttactcaggatatttctttctagttctctccatttgccaggaaatttcatgtctttgtttttaatagatgagtaacactccattttatagatgtattacattttctttatccactctttcattgaaggacatctaggttgttttcagtttctgtctaatatgagcaaagctgctgtgaacgtagttgatcaaatgttcttctgttgtgatagagcatcctttggttatatgcataggagtggtatagctgggtgttaaggtagatcaatttccaatattggtttccaaaagtggcttacataagcataataaaggcaataaagagcaagtcaataacctagaataaattaaatggagataaacttaaatcacctccactaaagtgaagtgtagtgatatgttatttatgatttattaaagctttcctgaggattcagaaagcaaagtcagccacaaagccataagatgttaggcaaacagctttaataccagcagccaggagctaggaggtagtgttacacacctttaatcctaggattcagaattaagagattgagtgatctcttcaagtccaaggccacccagatctacacaagattaatccaatcctaaagagaaagagctcacacaaagatgatctcagcacctggggtcacatgcctttaatcccagcattaggaaggtatataaaataggagcaaggtctcagtatcaggcattcattctccagccacactgaaggcagaaggcattcattctccagttgagaacaggaatgcaccagcccttttagagataagagctctctggtattttgactgctttgcttcattgatcttcaggatgaacccctatatgtcattttgggtcattcatttatcattttacagtgtaggtcaagacaaggctggccactttcaccatatatttcaatatagtacttgaagttttagttagagcaataagacaactaaagaggttcaaggggatacaaatttggaaggaagaagtcaaagtatcattatttgtatatgatatgatagtatatgtaagtgaccccaagaattctaccatggtactcatatagctgaaaaaattttcagagaagtgggtgggtagaaaataaactaaaaagactatcagtaaccctactatgtataaatgggctgagaaagaaatcagggaaacaacacccttcacaatggccacagataatataaactatctcattgtatctctattcaggcaagtaaatgacatgtatggcaagaaattcaagtctttgaagaaagaaattgaagatatgagaagatggaaagatcccccatgctcatttattgctaggattaagatagtaaaaaatgaccattttaagaaaagattaattaatttatttttctacatttttgaactttgaattagaaacaacattgttttacatgccaatgccagtttcctttccctcccctcctcctctgccccacacccaactaacaccctacctatctcatacactttctgctccccaggaacagtgaggacttccatatgagaacttcagagtttgtcatatcctttgggatagggcctgggcccacccccatgtgtctaggctcagtgaatacccagctatgtggaatggactcccaaagtcaattcctatgctaggaataagtactcatctactacaagagctcccatggatttctgagggctcctcactgacacccatgttcaaggggtctggaacattccaatgctggtttctcagcaatcagtctgtcaatcaagagctcccccttgttcaagtcagctgtctctgtgggtttcaccaccctagtcatgatgcctttgctcatcactcctccttctctgcaactggatttcagttcagttcatgtttagctgtgagtttctgcttctacttccaccagctggtggatgaagaatataggatgtcaagttagtcatcaatctcattatcaggggagggcatttagggtagcctcccctctgttgcttagattgttaggtggtgtcatctttgtacatctccagacatttccctagtgcctgatttctctttaaacctataatgactccctctattatagtatctcttatcttgctgtcctctattcttcccctcactcaatattcctgctccctcatgtcctcctcaccccccatcttctccccttctcactctcctagctccttcccccatgcttccaattttctcagggaatcttgtttctttccccttctccaggcgaccatgtatatctctcttagagtcctccttgtttcctagtttctctggtggtgtggattgtaggctggtaaacctttgctctatgtctaaaatctatatatgaatgagtacataccatgtttgtctttttgtgactgggttaactctctcagaatggtttcttctacttccatccatttgcctgaaaattttctagattccattgttttttttctgctgagtagtattctattgtgtaaatgtaccacattttctctatccattcttcagttaaggggtatctaggttgcttccaggttctggataatacaaataatgctactatgaatatagttgaacagatgtccttgttgtaggaatgtgcttcttttggctatatgcctaagagtggaattgctgtatcttgtggtagactgatttccattttcttgaggaatcactagactgatttccaaagtggctgtatgagctggcactcccaccagctgtggaagagggttcccctttattcacatcctttccagcataaactgtcattggtgtttttgatgttggccattctgacaggagtaagatggtttctcagagttgttttgatttgcatttccctgatggctaaggatgtcgaacactttcttatgtgtctttcagtcattttagattcttctattgagaattgtctatttatttctgtaccccactatttaattagattatttggtgttttggagaccagcttcttgagttctttataaattttggagatcagacaacaaaagctgatcaaggggatacaaattggaaagaaagaagtcaagcttttactgtttgcagatgatagtctacataagtgaaccgaaaaactctaccagggaactcctacagctgataaacacattcatcaaaattgcaggatacaagatcaaaaaaaaatctgtagccctactatatacagatgataactgcactgagaaagaaatcagagaaacatcaccctttacaattgccacaaacaacataaaataccttggggtaatgctaaccaaaagagtgcaagacctgtatcataagaattttgagtctataaagaaagaaaataaggaagataccagaaaatggaaggatctcccatgttcttggataggtaggatcaacgcattaaaaatggcaatcttgccataaggaatctacagattcaatgaaatccccatcaaaatcccagcacagttcttcacagactttgaaaaacaattcttaactttatatggaaaaacaaaagatccgagatagccaaagcaaatttgtacaataaagaacttctggaggcatcaccatccctgatttcaagttctactatagagctatagatgtgaaaacagcttggtattggcacaaaaatagacaggtaggccaggaatggtgttgaaaaccctgatattaacctgctcacctataaatgcctgatttttgtcaaagaatccaaaactatacaatggaataaagaaagcatcttcaacaaatggtgctggcataaatggatgctggcatgtagaagactgcagatagatccatgtctatcgccatgcacaaaacttatgtccaaatggatcaaagacctcaacatcaacccagccgcactgaactttttagaagagaaagtaagaaatatccttggatgaattggtacaggagactgcttcctgaacataacaccagtagcacagacactgagatcaacaattaataaatgggacctcctgaaactgagaagcttctgtaaggcaaagcttctgtcaacaagacaaaaacaacagcccacagattaggaaaagatattcaccaaccccacatccaaatttacaaagaactcaagaaactagtctccaaaataccaaataatccaattaaaaagtggagtacagaactaaatagacaattctcaatagaagaatctaaaatggcagaaagacacataagaaagtgttcaacatccttaaccatcagggaaatgcaaatcaaaacaactctaatataccatcttacacctgtcagaatggctaaaatcaaaaccaccagtgacagtttatgctggagatgttgtggagaaaggggatcactcctccactgctggtgggagtgccactttgtacagccattttggaagtctttatggtgattcctcaggaaaatggaaatcagtctaccacaagatccagcaattgcactcttaggcatatacccaaaagaagaggctgtgtgaggaagacatgatgggacagggatgttgagttgggggaagaacagaagagagcaagataagagataatttctacaacaaggacatgtgttcaactatgctcatagcagcattatttgtaatagtcagaacctggaaacaacctagatgcccctcaactgaagaatagatagagaaaacattttacatttacacaatggagtactactcagcaagaaaaaaaaacaatggaatcttgaaattctaaggcaaatggttggaagtagaagaaaacattttgagtgaggtaacccagtcacaaaaagacagacattgtatatactcactcatatgtggattttagatatagagtaatggattgccagcttgcagcccaggaggatcctaagagagacatacatggtcccctggagaaggggaaagggacaagatttcctgagcaaattaggagtatgaggggagtggagaaggaagtaggagaaggagaatgggagaagaggtggggtgaggaagacatgatgggacagggaggttgagttgggggaagaacagaagagagcaagataagagacaatataatagagggagacattataagttgagaaatcaggctctgagtgggtaatgtctggagagctacaaagatgaaaccaactaacaatctaagcaacagaggagagactaccttaaatgccctcccgtgataatgagattgatgactaacttgctatgctatttccttcatccagcacctggtggaagtagaagcagatatccacagctaaaccttgaactgaactgaaatccagttgcagatatggaggactggtgagcaaaggggtcatgagtagggtggtgaaacccacagaaacagttgacttgaacaagggagagctcttggtccccagactgatagctgggatgcctgcatgggacttatccagaccccctgaatttgggtgtcagtgaggagaccttgggaatccatggggcctcttgtagtagatcagtacttattgctaccataggaatggactttaggagcccataccacatggagggatattccttgagcctagacactgaacctgatagaagagaaagtggaaaatacacttgaaagcattggcataggagacaactttctaaggagacctctattcctgcaggcactaagatcaacaattaataaatgggacctcatgaaactgaaaagctttgtaaggcaaaggacaccatcaataggacaaaatagcagcctagagaatggaaaaataattcaccatccccacatgtgactcagggttgatttctaaaatatataaagtactcaagagaactagatatctacaaaccaaataatccaattaaaaatgtattccagacaccaacaatgaattctcaacagaggaatctcaaatggctgagaagtacttaaaggccctaccctgcctggggagtggtggatgggatgggggacaggtgggggagtggggggagggttgagggaggggatggggaagggattgacatatgaagcaagcttgttcctaatttgaactaaaaacatttaaaaattttaataattaaaaaaagaaaaaaaaaaagaatgagcaaacatcatgacactttgattgcagaactgattgtaatgcttgtaacgagaggttctttgtcctggccggtcccgcagccaccttgccccaaataaacaaagacttaaattaactataaaaaaggaaatggtcaacttccttagtcatcagaaaaattcaaattcaaaggactctgtgattccatcttaaacttcccagaatggctaagaaaacaccaatgataggttatcctggagaggatgttgagtaaggggaacacacttcctctgctgttagggatgcaaacttggacagccattatggaaagccactgtgcttttaagagaaaaatgttaccctttctcaggcattgatgattgcatatttaccactttcaagtgtgattggactagaggaatttatcaactcatgacagaataggatcatctcttgaaaagaaatttcaaatacacactaagtttgcattagataatcattttaacagtactcatatttccattgctatgtaaaataccataaacaacttacaaggaacaaaggctgattttggctcatagtatcagaaatcagtccatgcttgcttgtatctgttgcttttagtccttgaggcaaaacatcataggaaggagtatgtggcaatacaaaactaattagttcctgttggcctggggacagaaagagaaatagatattgaatataaaagagaagggaaggtgatgtggggtttccagttttcccactggtggcatgtcctaagggcataacttccttctactttccaagagatctaccaactaactataccataggctgatgaacaagctttcaacatagggcctgttaagggttgaaaattacagcagcatattctctttttaatctacatgaagaccattcttttattgctctttttattggaagtatattgttttctcatacagtatttactggttacagttttttttcttttcatacttagaatataaaatatagcctctacaaattttagtccttctcatagcaaattatgcacaatgtctaggcagattattgagtgggtgaccattttgtgaggatgaaagtactcttgatatttttgaagagcaatcctcacagactttagcaagtaactgattttgtttatgaatccacttttgaggaaaaaatttctatggataattcaaaatacctgatcgaatgccatagtaaggcattacaatattactgaagccaggtaaatagttcttctagtgaacacaattaaaattgcaggtatgaggtagtttataaaaagttcattgtgcctatttgattatattcatgttgttatttacttaacaattgttccataactgcattcaatatctatgttattatcaatgtttaatgtctacaacttactagctataaatattttctgtgtaatagaaagaaataagaatttctatttaagccatgcctttttatagagctaggagtttaaattgatgtatgctaagagaaagacttcagaaaatacagtgtgctgggttggctcattttcctgcaaatgtatagcaggttgggcagagggcatattgtggccagttacatgttctgtggtaggatcccaagataaataagtaacttaaaggtggatagatttgtatgggctcttgattaagaggttccaatccatggtccattgacaatcacctttgtgttgacatgaggcacgacatgtgacatagaaagttcttcactttatggcactcaagaaataaagagaataaagagaataaagacccagaaacaaaatataaccttcaacgacacattccctaggatatattcacacaaatgaaatgcaacatcacgtatttctattattaaaaaaattatccatcaaattatgaacttttcaatgagtcaattctttaatgagtttcaagtcctcatgacctttcctctaagctctaactataagcatgttgcatgttttgcgtgtatgcgaggagagcacagtaaagaaacttccaaaatgaccattccgttagtggaagctttgttgctgttgttgtttgttgtttttaattgtgagtaagagagagaaaacagcctgaaacatcttgaagagtccagagcagaaagaaaaagaaatagacaacaaatgggttatctgcaacagaggtggaagaacaggaaagaatagtggagatagcaagacatagagaatagcaaaagaaaccaagcaagaaaatggtggcgatagaagagctacaagaagggaggaaggctgaaggtaagcgggaggttggagtgaactttgcaatgtgtaacaggtgcctgtgaatagtgactgagggagctttcaggccagcatgggctttgatgggctgatagaagtcacaggtaaccatacttctcttctgccaggtaactcctgttggaagatgggaactgttttcacaagttcctaaagaatgctggctttcatttaaccattagaaaccatcctatagtccagcttgagttcatttctggatatatgggttatcggagaactatgatatgggacgttctagctctgcgcagtagcaggggtgatgagtcaagttgtggaaagaattaggatgtctgtgtgccttgggaggaaattagaagataactttttgaaatggccagaaaaagtcttaattgcaaaatatccagtaactgatttaataaactttgtgaattccgagtctgtcatctgtttgtctgcctatctataattttatctatcctctgcctattatctgtctgtctaccattgtcatctttcactatccatacacatttccaaatgtgtcttccatctccaaagttcattagtcataaagttgacacataagcagggaacaggctgacttccatatcttagagtagatacaaagaataagatgtcaagaggcaaaagcctagatttgaagtagggtaggagatgataagtactctgaaaatttgtagcaagtgaagaactcttggactttttataatttgttagatgaaatcatgtactatattgctatagccaacttagggtagtagccaaagaaaatattagactatatatataatcatgtaaatttatctttggactgaagccagcacatttgattctgcatattgtgagacaagacaaccgatgtattagtgatcttgcttcaataacacatcttgatgaacattctcagagctcccatttcccttctcaccgagaagaaaatttcatatctgctttgccctaagatacaggtgaagcccatggatgttatctcgacaaatgtgcagaatgaattacttcccagcgtcacagagagaactggtagttttttttcctacatattttccaactttcagcacaatgtcttctatctagcaggatctctgtaaatgctcatgtttttagctatggaaaggtatatatgggatttaaaaaaaggttatatctaactttatttgtctggcaaagcagttaactttattcagtgggatgggaaagatgctaagtgttccccaccacactatgattttcacaaagactggggcaatctatgtaattaaagaaaatgtggagtgctgtaacaagatggaacactcattagctgctaagcctgggaaagcctcttgaacgatattggcagatttagttgtgaacaatttagaagacagctgtgggtttaactcagataaaatatgttcccatgcctagaaaaattactgatacatagaaaagatggcaaaagaggcaaaagaagggaatcccttttatttcccaaaacttcacaagagctctcagaataaatatgaagatgtttccacagttttttgaggggggatattttaacaattttctagagcctccagtatgctcagtgacataaactggaaaactccatattagcagttatctaacttagaatatagctgtatttgggcaggacctgatgatagatatttcatatggtagggtttgggggagtataaaatccaccttgaagggcatataaaaatgggcagcaaattcagaggaagctgaataaggcacagaaaatacatgagtaaagagattaggttagtaaaaaatcagagggagactgggtgcagcacaacccagtgctattaagcaaaatagtcgagtatatgactgcctttttctttagtagccctgtaaacgcttcaagaaaccctgtgttccaagcagtctttaactagcttgagagcaaaacttttataagctcccaacaaagacatatggaagagctgtctccccacctcttttgcatgtagaactgtggttgccactgtatggaagaaaaaaaaaaagcaagattctggagggggaaagaaaaatacatgctaccattatgtcttccatggcctgtctccactttaaataacttcctgccataaggtggagctatatcctatccacaaaaaagtatctgatataagatctgccaaaagaccacttaaatactttctttgcttgccgtgtgttttgcactttgaaaaagttaaaatgcatggcagctaacccctaacccaccaccaactgatagaaaaggggttgtttttttttttagttcagctcggattttaatgtggagaaaaggtgtgcaaaacaagcaggacctttttttctgcttaggttgtaaaggaagctccagggaagcctttgaagtcctgagatctgaggtggagggtgttgaaccccctgaggtagcagagagaaactgcaggtatctgatagtgcttgctctgggtacattctgggtaaattacccagaatatcaaacacacaattgacaaacaaaatgggaggggtggtgttttatttaaaagagtgcattgttgaatagactcaggataaacaggagtttaagaggctggattataacagcagtagaaggttttgtttctgagtttgtgactacaagcaagggccctggctatgaaagcccccagctgagttatctgtaaaatccctaccatctccacccaaaggaaaaaatggtccccctaagagcaagagctccacaggttttctggtaacacatcaagggtaatggagataaaggagaatggctcaacaggagtgtgtgttgcctgactccctgggcagtgctctctatctggaaatcaattaaagggcaaggtacaccagctcatggctgatttgggatttccgtagtatagatttgcataaaaacctctccaacaactgaaacctcttgtcgaaggatgggtttgattttgctggagaaaaaattctttccaatacaaaccactgatactgggaactatgtgttatctaagtatccaattgaatatgcaagtctgcttttccccattgacagcataagctagtcacctgtcacagcatctgtattcttaatgtttctttctaagctagctgtcactttccttctacagactaaccttctgcctagtcatctccagttcctcaaagagcctggcatgtaacagttatacaacaaatagtttctgaatatgtaaccctcagtccaactgggaaaactgcacacacaatgactcatcttttcatttatgtaattctttcctcccacatcttcctgtccctctatgtcttcactttgctctgacaaatgcatgttggattttatgtgcttttgttgttgaaacagggctctcacccattcacctatgtttttttgtcttacaactttgaaggactttctgctttcttcactacaaagcacatctcaggcactttgaatcaacccccccccctctgcccccaagtttctgaagcatagactcacactgctagggattgtccatccatccagagcacctggggtttaaggtgtaagcaattttactgtaattgcttcttctcagcggttattccttgaagtagtggagggggacgtttggttggttctctttttccatctacattagtagatattagaaccaaatccaaagagcatggcatgtttatctaaaaataaatgttaccccccgatgaggagagactttagctacaattttatttgtggctttatttttcttagattacatgttagcagaaacttaattcactcttccatttacatttgatactttcatttttctgggtaagttcagtcataagttttatagtttactaattaaataagttgcatctttttttttcctttttcttagctctcagtgttgaactgatgtcctgataacataaatgctaccttggattcaatactgcttcttctgttgtaaataaagcaaatgaattcagacactttgaatatcctcttttaaggttttagtttcctcaaacttctttattagcttttggtaaagaaaccagacctgctagttttcatgatggataagagataggtaggaatgtagtgacttacttgaatctgtgtattgtttcagtttcatacaaagaattacgatactatggatttgttctgaaaggaaaatgttgcatgagaaacatatcgtcacaaatactttaatgaagtattaaaacattttaaagataaaaatcaactgcagtctagaaaagcaatagtgagatggacgacttcctccaccagagtgaattgtttcactagtcagctataggagacagatgatgaaagtgcaccatggtgtccctcacagaagcaggagagaagatgggcttccctttctaggtattaatatgtagtgagaggatttttgactcctgtgagaaaataagccatttttttttataaaagcaacatgaacatgtatctatgaaggaccagcatacaatctttgtgcaagtttcattcatcacagtaatgggtaaaacattgattgttattgtcccaaagtaaagatataattttatttctaatgtaaggcttaagaggtcatacaaatttttcatctgttgcttttcagcatcacactattcgcatgtgctgtcagtgtgtggagaagtgggcaatcgattagaatgtaacgctagtctgttggaagcatttacttattccaagagtatgcgttcacagtgcgcagcacatatgctgtacttgcagctaaggtaaccgtacaactgatcatctgattccagacagtttgagggatgaaatggagtcctaacaacgaaaaacctgcattatgaagaagaaactaagattttcttaggagacaggaggcatgtgattcttgttcttatggccataccttaagtcacacacaacattagtgtgtcaatttctgatgtttcagtggttctaccagaagtgaccaatctatagcttatagatcacatggacactaatagagctatgagtatgctcaacgcaaaatcataaatgtacttaggatgttatgaaatcctatgtgtgcctgagtgtgtgtgtgtgtgtgtgtgtgtgtgtgtgtgtgtgtgtgtgtgtgtgtgtgtgtgcacgcttttctttctttgtaagctaattgtaatattcttgggtgtaaaccttatagatgacaatgccatgctctatcataatgccaaaaggatttgtacagtatgagttaagaactaacttcctagtactttgagtcttttagaaactggaataaatccaaactgtatttcagtgaaatattttcatatcattttcaggataaaagcaacatgttagttagataaagcagtatttaataatcaagggaatacagatggaaccagaatggaatgatcataagatcatggatgaatgaagtagttttgtacctaaatatacaatgacgcacttctagatctctccaagaatccacaagaggaaagaaccatgcatgctcttggatgttcattaaatggcagttatatctgtgtcacttgcctatgtttgttccatgactgtgcctgggctgatcaatgagcataacacaaaactgtatatacatttaggtggtaatacatagttatgagaaaagtggttttccctgtgtgtagaagagttcattcgtgttcctggggtttggtgccttctagtggcatcaataaggcacatgtgtgcttcttcctgccatgtgtgagagaaaaatatggtcaattacaacagtgaaatttactaaatgtgatgataaacacttttaaaagcagctcaacaaatgattatggatttcacacttttactaattgcttcaatttctgtctgaaatgaaaatctacttgctttagtattgtagggtagcatgcactagaatatgttacaaatattctcaaagtttctctctgtaccttatagttttataggggactcttttgtcctataaattaagaatttttaaatatggtaatagaaatacatgtaaaacttaaatataaaggtaagtatatttatgccatattatatataaatatatttgtgtttatgtatgcttattaatttacctataattattctaaatgtctttctattaccatattcttcgttatttcacagaaatttcagattttgaaatctttgctatgaaaacatagatttcacttttttctttcttgacttaacctagcaaagttccagctccagcattctgtatcaagggagttacacccaccccctagattgagggtggttatttgttgcactggctcgggcagctgcttatttaccctttgtggaatttgccattttgtaaatttcctttgtgtaggtttcaggttctgtactcagtagaaggcaattttaagatgtcaaggagtgtgatatcttgatggacatttatgtgtagacagcatagtagaaagtaaatgtctaagactatgagagaagaaaagaagcaaacaaagcctgaatggaatgaataccttttcctaagacatactccaagcattctgcatagtgatgccttctgcaaagcatggtcatctcaccagataagtatgattgtccagtcctaggttgaggtctcagtagccaaatatcaattttgtgtcattttaaagatttgactattttatattaattgtgtgcatgtgtgtggacagggtggaggtcagtaagcagctggctggggactcagtcccctcctttgatattgtgggtcttgaggtcagactacctcacaggcctctactagaagtcaaatattacattttcctatgttttaattttcttttcctttaaggttcatctccatttctttcattggatgcttcccacacctctttttatcttgtttgatgcatatacattaaacagattgatagaggcagcaatgtgggactgaggacaccacattgcataaagcatactagtcagtggtattacagtgaagtgcctatttgtctttctatcatttagcaagctactttgaggtatggcttgtattgcttctgctgtatacctatccttactttgccctatacaatccttacatgttttcttctgctcagtgatccagatgggtttgcttgtgtgcaaaggtcagggggtgggatgggtggtgcatgaggttacctgagacaatctttctagcattgtctcttggctttgaaaagaaaccccagctcaatttgcagttgagtatgttcagatagctgcccctcttcttggtcctgtcttagttctagaactggataagacttcccccctcacattcacagctgctggatataggagcgctatgttctctttgttgacaatccagctcttctttttccaatttgaatgtggtgttattcatgtttattttcacaaaccatagattttttgaatgaataaaagtgcataatccaaaattctatcacatcaccatgatttctgataagtatctaaatgtcagaaatagctgaaattacaaaatggaaaacagattaacaacctctaatgactccatgaagtataatatgtttctgagaatccttattctaggcacatgctcctttaaatataaatgcatgttagttcttttaccgtttcctgaccatgtgtcctgagagaaaacacacaatgtttctgagccaaactgtcttcagtttttctttgaaaagtagaacatactgaaacatatagatttctatcagtgctagtaacaggataaagagttggaatttgcatcttgaatgcaagtaataagatggtcaatttgagctttaacttgtagccttctgtggggtgtgtcttagtcacagtgctttgtttgattcttttcatcgatgagccctattcatttgctaatgaatgaaatttttgctcagagaaagctaacttttgggagccggggtttcaaatgcccccccccccgtccatattctcttactgttgaaacagatttagcctgtttttggtttttttttttcatattaaaaccaaccatgtggatattgattcttctccattatacccatttgggggtacaggttgcttgaaagtctgtcaaactgcaacaaacttctttaattttccttctaattaggacactttctacagagtcttgcgcacatccaaagctgtattagcaagagtcagtcagtgatggactcatgataaccatagcaactgcattctttttcccaggtgctccatgacaagaaatagttcttgtgattttgcactttatctggaaatttcatactcacatgactgcagattgcatacacgaagctttgcctggtttatttatttataactactgtaacgttttaccattgtcacgcagaagatatagcaggaaatgacttgtgtagcttcaccatacttcaattaaaactaagctctattacttcttgatcttggttttctactaatgaaagataataataatgtttaatgataatttttaagctaataattaaggtaggtaaacttctgggaatattatttgacatttaattagtattgaaatatgcaggggtttttgttctaaaatccagtaagcttttttttgtatgtttcaaaacagatgtatattactatttcagttacttatagaaagtttatattgtgcttatttaatctttcatagaatttcatatctaattttcactttccacacaatttgtatcaatgattcttcttttcccaggagtgcaataaatatttatgcatatgaaagtaaatatataaaagtgagtgtatgtaaaccttacttagaagcatgaatgatagatgtgaaatttctatcacttcattctgaaacaaaataatcttcttttacaaagagatgcagtgagcccccatcttacctcagaagccccagtcattttggtgaccagtggatgttgcctgagaatggatatttaaaaacaagagcttaagagacaatagatattataaaaggtaaacaagacagagagactcatcttcaaatatcacatctgaaattgtcctatagagcctggatgcctgttatagtttagcagtcaaggcagaacaaggcaaagagaacttcagtcttcctgttctctccttctgtgaagtaaaagcaaaatgaaaaacaaaacacaaaaggacagctcacacagctaagattgtatgagaatctgctagaagtaataaaagagctggcttgctgcagacttactgagcttctcccttctccatatgttaggaatttcaaaaaatttaaaagtggcttctgacaagatatttgttaaatgccttacaagtctagcaaactttcgttttcatcgttatgctttcttcagccctagatagactacttttattattttcagtttttgcatagcaatgaggctatgaatgaaacacctaaggaattaacttaacattacctttaattttgtttctaattcacgtcttttatttaacaaaagataagtgattttaaggttgaattaaaggacaatgccggatatttccatatagctctgaacaccactatgcagataaggaaatttcaagatttgtgagattaaatatatatgtgtggatatatatgcatataatgcaaatatatgtaaaagtgtgataccctgagttcagctgctcagcttgcaatatgttagtccataatttactctctgattgaaaaagttgaaaaactacgagtttaagctttcacataggccctttctttgcattgcttaattgaattgtcagtgctcagagtattatcaaaaaatctttggctttgtgtaaatattattttaattttttcaatctaacaaactatttattatctactgaaaatattcctatcaagggacaccctgaattcaaagctgagggcatataaaggtataaatcaagtctgttagtctacagacttgagatagctctagaagaagaatgagaagatcaagaggatgaggaggagggcagaaagcacagtagcattccagcttgctgtgtgtttcattttagataatagaagtacagttaagaaaaacaaacgcataagaaaaatctgtgctgcatactgtactcactatccccccgaggccttgtgagcaatccagtccctataccaaaaccttattgaaattgccatcatcaatggctttgtacacatgctctgttatgttattctccattttccatgttaccaacaaggagacctaattgagataatatgcaaagtatctcccctctgctgttcataactctctacaggggaagcttttattttccagtcaagattcttaacataaaggtgaaagtgttgacgaattcctcagtgatggtgcaattctttgaaattcactactctagcccaattctcattttgatttatttaagtttagaaataacagtattaaattagcaaagacgagcaatgaacaaagccctggagatgaattagccattgtctctggtccattaatctcctcttcaattcaagagaattgtggctcacccagacccgaagatcaaataaaatgcctaattgggaaagtcctaaacaagtgtgtcctggggagcttgaatttatttgtcactgctcaaacaactgtgttgtttatataagtctttaaaaccctgatactttcctgctactatgtcttaatccctgcttctttatgctcaggagggcaattgagagttgttttcaattaactagaatggagaggggcacttattccaaaaacagatagctgtgttgtgagtattttgccaaacatgctgagcagtttagaactaagcatcaggtttgggagatgctttgggatctccttgaagataatgctatctgctttttggtgcttttaatatcagtaataaagggttgaacataatcacaattaagaaagtatggctaggaaggttgtgatgttaaagctaaacacaattgtgaagcaatgagctaatataattatctaggatgacaatccgtacccggcgatgctttcattagaaatatgcagatgatatgcagataatggagggcaaacttttttaacatacagctaaatagaataaaaattcatcttctgaattcattcacctagagatggagtgtttctttttggtgtgtgtgggggtaaatgcaatcatatttcaggttctgtaaaataatgtcaaatgattggaaactagaagtcaactaacagcaaagtagcaatacacaatgtatattcacattgatttagtctcaacgatcacgtaaatgcagtgtttttgttttatactgtgtaacacaaaaaaatgttatttgatcctcacaatgtatgagaagcagaaatgttattagctttattatcttatggatgaaggcatggggctatgtatgggctagacacccaaaacgttgttgggtggttttattaaagtccacattccagcttgtctgctttctagacaatacaccactagaaataactgcatggctattatcacaaagattgtaaaactgttagcagagtttattggagaagctgattaaatagagtaaaagttaaaataaatttgtgaacctacatgaacccggataagttaaagttcaagaatatatatatatatatatatatatatattcttcttagagatgtctttgccatgatgaaaacccactgaaccttcactgtggccttggctaaacagagcatctgaaggatagccatgttgtactctatgccttcagactagcttcccttttctggtgcattggtgcatgttgtctttaactgtgataattaactgaagcaagataataatgtgctagggaatgtcacatatagattgagtcaacttgagcattgcactgactttaacttctctattattaatcaactctacattaatttattttaaataaatactcatttgagtagagccagagcagactttaagatgacaaatagtttaaaatacaggaattatgagatgataattagcatgataatctaagcataaaaaaccttactgttattttatataggcttgttcacagttatttgattagacaattacataccaaattggtcatttaaaataactaatgtataataatagcatagttactcagtaagtattttcagtaataggacttaagcatagtgttttactcatttctcagaataatcttgttgcttgtgtatttttactttacaattttagcaagagaaaaataaagacacacattatttacaaagttagagtagccatagctgaaaaggagctgcctatagtaaaaatctaagagaacaagatgggacagattataaaaaaatactatagtgtaatattgaaatgttttacttacatggtaccttttatgtagttttcaagcagacaaatccatatgttctcaactgtaaagtttactatatttagagagagaaaaaacaagaatatttttcaatcttaaaaagtgaaaaacttgcttatttcaatatatttcttaatgtatttccttgtagttaattatgcagatccattgctatctagggttacctacttcaaatataagaaatctgtctcaccattcttctcactccttacttccattctctcctctaccccttatctctctctttcctcatcttttgtctcttctctttccagtactggagttacaaaacggtattatttagtttatggtatgaaagaattagctctggttgatgtttgaagttcccaccatcctgagactatgcctggaaatgtatgagcaggttgtctgggaagagtctaattattcatagtatattacattttgactatcttcacatttcagtctggttattttagctgttgcatgcttttctggaaacattcaataaaggaagcaatattaactgccttctcataaattaatttacctagtaaaataacaaaaaggtatcatttaatttctatgtatcagacatgctgatagaatcacacagtacacactgagtaaaattagacccattttctgaattttactgtcaaattacagaaagatagtcataaaatcacataagataaatatgaaatttactctttttctaagaaccagaaaagtatttcctttattccatacaaaaggaacacatgattagaaacactaatctggcagatctcaaaaagtttctatggaaatttacctatgagtggaaactgaggaggagttggggaaaagggatggacagggtagagcttccaagtgcaccttcaggagaccatcatacatatgagattgactagagccaaaggaaagggctattatggagcttgttgagttagtataagcaaatgacttcagtatgtttgagattaattttaagcaccaattttggtggtcattaagtccaaatgtttggaaaaggtaattgtgaacatttctgggttttatctgaggtcagcttgtaaaatgatggacagtcagtacagtcaatagtcttccagaatatgtgtgagccttggtcaaacagtgggaaacctcaatagccaaaaactgaccactcttattcttccttcccccaggaaaaggcattttgctaggatactgcccctggcttggagcagcagctctgctcttctctccagtctgctggtttacccagcaaactttgtattgtaagaaccacaatggacacctaagaaaattcattaacataactgccacctggcatagtacttacattagtccccaggactcaatgaaggccacaaagtcttttatacaatgttatagtatgggtgtggtctaggcatatcactcataacattttaagtcccctcaagcttactcataatactttatacaatgttaatgctgcaaactgttgcaatgcttaggattaaaggagaaggaaagttatgtacatttgcagtatagataacacttaagaatattttaatctgtgaatctcaagatgtggaactcatgggtatggaaggaaatatcagacagcagataatagagagtagatggcagtcaggtagataggtatggagtagatgtagagacagagaaagacagagatagagcttgggtgtggggaggaagaagaaaagtgagtttaagtcatatgagtataattttattttttatttctctaaagaaacctaattaatatactaggttattggcatgattcaacatataactagatattttaagcagatttaaaatataatgaatggaaaaaataaatacaatatataattcaaacaaatgtgtgtgattttactattgctgttaaatgatagggggtggtgactaactaggcagagagacggttttcttgggagatattatgagctcatgggacagattctgcctaagcaacaaagtgaggcagatgtaagtgtgagctgatggtcagtcctgaaccagctggagtctggtaacaaactctgaagcctgccatctttccctgatttaggaaagagaaggatcagaactcagaactgcctacttcgcaaaaagaagcagactcctttgcggagcaagacgatgtgaggctacctcccaggaaaagcaagctgctaagagagtctttatgaattatttagaaagaggaaattaagtaatgagccctgaacaactggctagctctttctgggttgctttctcctcgcatggggatacagaataagatgagtagaggaaaagagaaagtgaaataaccactcagccaaatatagcttgagaaacagtgcggtggactctcagcatggggacaagaggagagcactcctgggggagccttgcaggcagcgtcctgctcctgtgaggcgaacctgcgccagccagccacaacccagaactgctctttatgcaactaggttaatcttttttctttcttgccagctttctggagagttttactgtaggtgatgtctgcgaaaggctttcttttgagtgcaccttggtgctggctgccacgaaaccagacagtgagttgaaggtttcagttctgatctgacactcttatgtaggttcattttggagaagaagaaccaaggtttgacaattcgggagcatacagactatatttctgatgggctgccttataaatggcattccatttattctgacttctctaacatattagggtgtttatgtaacttacatgcggcactcagcattgattcaaagtagcaactgggtcacttgggcaagtgttggcagaaaaaggtagggacagttttagagaacacactatgaaaaattttaaaaagatttccgcatatttgtgatgtagggaatttttaaaaatgtgactgacataatatgaggaaggggtggagaaatatcaaagttctggaaatttagcagaatcttgcattcagttgctgaggtggtgagagagggtaggaagtatattttccttattcaagatactcatgttaaatttataaactattcacacactgggtgactgtataattgtacatttgtctcagacggtttattgaggtacttcttttgtgtctgttgttgagcacacagctgtgggtaaatctgatcagatccccaatgttagttctttagttgtccctctaagtgaaggtgatcaaaagtagaggggaggttgcacataagcaggcatgagctcctcctgctgcactgtcaggtaggcgagaatagtacctggctgagtgtgcactccatgttcaggttaaatgatggaaaggactccaggaaagggaaagaaagcaccctgctctttgtccggcatatctgctctgtgatctttacatacctgttggacggtagttctacttcaaaacactctacatgtggtttgtctccgaatattgacatttctaaattcaatcctctgttactgtctttgctaggtacgagctctaccctgggtatttacatcccccccccacttccctccccactccctttcttcattcctttctactttccttgcttccctaccccctttcttcccctttgtatttggtacttggacttcagggcataactttcttttatttctactaaaaccattatttctgggtgtttgaagaccatttggcattcaaatgttcacaaagatttgaatatacaacacatcctcttacatgtaggaggcacaaaaattaacttgttgaccgattcttgctggtgctgtaggcagtgagacaggaaataaagaggtaaacatgtattgaatgtttgaatatgagaagtgataccttcagtaccaggaagaagacaaatccaggaaagcgagagtagggcaagggagtaggtggcctcggggacctttttgaagtggtaacatttagattgaaagttggatgaagaaaatgtcctaagtctgactggaaactcagagaagtacaatggacatgaatactgaagggaagatgcttcatgctgtcagagagattgtgattcaaatgggcatgagagggcttgtgcatagcagggaagaggaggcatgtttggactttatttgaattgaaatggaagttggctgtagattgatgagtgacaggtctgatttatacttggaaaaccaccctggtgtctatggtggtggacagagtgccacacaggaggaatcagaaaggtcaggaagaagttgatttaatattttagggaagagttaatggtgtaggggttggaatcacagctcagcattgaagtaaactgactactcttccagaggacttggcttcaattcatgatagctcacaactgtcagtaactcccgttccagaggatccatcaccctcaaacagacatatatgcagccaaaacatcaacataaaacaaacaagtcatttgaaaaatagagttaatggtggaaatcatgggagagattttgtttaaaaatccttgtttcctagcttctctgaggttgtggattgtaagctggttatcctttgctctatggctaatttctacttatgactgattacatatcatgatctgagtaaattgggagcatgggggaaggagggagttaagagaaaagtgaggggagaaggggagggaggaggagaacatgaaggataagaaaggtcaaattgtgggaagaacagagaaggagagcaaggaaagagataccttaatagagggagccattatgggattaataataaatatgacactagggaaattcccaggaatccacaaggatgatcccaactaagaatctaagcaatagtggagaggctaccttaaatgccgttcccttataatgagattgatgattaccttaaatgctatcatagagccttcatcctctagctgaggggagcagaagcagagattcacagctaagcactgagccaaactcctggaatccagttgtagagagggaggagtgatgagccacagaccacagaaacagctgacctgagcaagtgggagctcatggaccccagactgtcagctggggaaccagaataggaccgaatcagaccccctgaatatgggcgtcagttgggggacttgggcagtctatggggtcactggcagtggagctaatatttatccctactgcatgaactggatttttggatcctttcagccaagatacagatgggagtgcctccatcctgccttaaataatgtgacagactttgatgattccctcatgagaagcctcaacctctctgaggtgtggatgggggtgggatggggagatggtggggggaatgggaggatgggagggagagggaactgggattggtatgtaaaataagattgtttttaatttaaataaataattaataaaaaataagcgcagtcaggtatggcagtgcacacctcttgcaccaaataccaagtaacctataggggtcatcaattggtcttaggagtttcagactaacctgggccatacagacagacctcctacctaacaaatataaggtagtcaaaaatttaatggtgtggtgaatcaaatttgatcctaaggtttggtgttgtggtttgaaagatggtctcattatgtaaccccagcttgcctgcaattttctgtgtggattgggctgtctttgtactcacagagatctacccatctctgcctttcaagtgctgggattgaagatattcactaccatgccaatcactgagatcctaaatttgaatactagttggcaagagagtcagtcaccccctgaagaggtcaggagagtagggtgctacaaaaatgtgcacaaggtggatcagaataattgctgtatgcttttgtctgccttgagtttcaatagtattgatgtccactaattgtcttaatacactgagatgaatatgaagttggaaccagatctcacatcagacatacaatttaaaagttgtcagtgagtatgcaggagtttgtcgagagcttgggagctcaaagcatccctgactggaaagaaatgaggaatggggtctgtgagatttgggggttattcacaaagaccagattcacaggggaaagagaaaaaagagacatggaccgaatgtctcaggaggagatagcctttcacttgtaaaatatagattttgtgttaatgtgaccgaaatagtcactatcaacaattaatgtggctattcatgctttgggaagggacatcttcacaggaacaaaggactggatagagacaaagttttcatcattttaagtcacattttagtatatctttacacttcctcgatgagtataccttttaatttagtcacagatcagttcatttattcaataaatcaacattttgcctggaacattaagagatctaccaaaaatctcagatacacacacacacacacacacacacacacacacacacactcatgagaatctttgtgtatttagaagtgctagacttttaagagtaaatgccatcaagtacaagcacagtcatttgtatcactgagaggagcatattcacaactcctgtttactaagtgctgacatcaccagggtctgtccaaatactacaccatgataatggtctcagtgttttcagatatttcctatctaccctttacaaataaagaattcagaagtcatttgatcagtgtcacagtactagttacctattttattgctgtgacaagatatctgacaatagcaaattaatgaaggaaagatttgttgtccttgacttaaagcacagtcaaaacacaaaatgctgaactttaaaacagggcatttttattaaatagaaacccttatgttatagggtgttagttgactcttagaatacagcacttttggaatttgtaggtgtgacaaaatggccagaggccttttatatgaattaatgacataattattttagtaatattgtagatgagttaagcccatgactgagatgggtcttaagcatgcttcatatacattgaacacatatatctctacagagatacaataaaattggggggacatgtgacctgggtgtagtgaggaatccatgcgcatctgtttaagtggtaaaatggatttcttaccatatgaaaagggaaaaatacactcataaatacaggatatggtaaatccagttgcagagtctttggaaagctgtggactgatcacatgcttcttcatgtctcttgaccaggtcttcaccacccaagagagcgtgataccctcctttctttccttaagaggtcacatcttcggcagaggtcatgagcagagcgaatgtctatttagaaatcttggcctgtgtctattctttcaatgcttctgctatttctgcccctttctattccagggtttaagatgactgaatctggttgacaacatatgaaatcctgaagtagattaaagaagagtttaggaaatcgtcagtgtatctcaatcaaagtcttgggatgaaactttctgaggaaagggccaattcctcctaaattgggtagaagcctgggggaggagggtgataggaaggtgaacaaaggcatactcctgtgaccatggtccttactaccgatgatgaacctaaataaacccattggtttagttgtagatgataaacctctgattaaagccactagataaattaaaacctaaaatgttccttgaccctaaaatgctctctctctcgctctctctctctctctctctctctctctctctctctctctctctcgctctcgctctcgctctcgctctctctctcggaaaagtagccagtggtagctgtcttgtcttgcacctggggagtgggtggaggtagaaaggtagccttagttgttagtattcagacagctgtactggcctgtctggggctctgacaggatatccctgcagccgctaagagcaccacttgtggatattcactatgttcccttttaaaaggccctgtccacctcccactccccctctctctctttgttctcctctctatccctctccttcctccctcttccctctctctccccctcttttctttctcctctctcctgctgctcttgtctccataggctggtctctctccttccatttcccctttttatgatccctccccccaaaaaaacccccaaaatgtactctgctttaacactgtcacatggcgtctgtctctcacatgctgcttttcttaaattacaatattagtaacctgctaactacagaatattacctattgcaggggaaaagggaacagaaaaagacaagactcatagtactttccaatcggtaacttttctttacatttccagaaccttagaagctacagaaaacaataggaccaaccaaaacctgtacaccatggtgccagcctattttacacatctccttttactccttctataatccctgtgctgccagtctctggatgaatttgtggtagctgcaatcttgttcagttagctggctttctgaataaacttttcattgctccagaatttgttctttagtcaatgactttttcctgtggttagcaaacaacacaggtttgcagttaaactgttaataactgggaacagccatggctccagagaggaaaccctaaagctactagaatgattttgggtagcaggtccagttacaacctatgaggaatgaagcaaataaagtctagcaagtaaagaaaggaaatggatttttgccctgaagaatatactgactcagagattaagttttgtgacaaagtaaatggtgatgggcaatatgaggacaaagtgccttttaacctgtgtgtctgctggttttgatagaggtgcagtaaaggactgggacaggagagcttgagagaccagaggagagatggataccagcatcacaatcaaggaggtttcctggaggtatgatgaaggctagctgaaaactttctccaagctcatagatgtctcacattgatgaagtagggatttaacaggaagttagagacaaacaagtggtaggaagtaaggttgtacttcttgatcaccagagctgatttaggcctgtttcgaattattcagcatataattctttttgttttgtttaatttacttacttaatatttaattattatttttctgtttggtgtgtgtgtgtgtgtgtgtgtgtgtgtgtgtgtgtgtgtgtgtgtgtgtgtctgtgtctgtgtctgtgtctgtgtgaatatatgcatgccagttgtgtgtgatgacctctatgtccaaagagagtatcagagtccttcgaattagagtatatgtatttgcaatccccctgacttatgtgctggaaaaaacaaaacaaaacaaaacaaatccagcaaatgtttttaactgatgagcaaactctctggctcgattaggctatgattctttagccagactagtctaggatgtggcactaaataatattataagcatatttctcctggtttagagtctgatagtcctttcccatgtctaccagggccttctgaaattgtagctctaactggatggatgaaaaagagtgttctctgctatgcttaagatgatattttagcttcccatctcctttctctctctgccaacttctcctaatttataaagatgttgagaaagggctaattgaaaaaaaataaaacctcaattgcattttaaatttggtattaaaatgtaaatccaggaatatttattttttctttttaatttgatggcattttttttaatttattatttggaccaaccattaaaatgaataatagcaaatccctcagtcccttccctttcctgaatttgtatgaactgttagtactatgggaaaatgtctttacagtgtagctctgatatgtcacatagggggcacttcaggttaattctacacacacacacacacacacacacacacacacacacacacacacacacacaaacacacacacacacacacacacacacacacacacacacacacacacacacacacacatcatggacagaccttccagtgtcagcacacatagcgtattttttcagtttcttctgaataagcccatgctctgaaagtatttcctgcaatcacaggacacaaaagaatgtcaaagtgccccttaagtttggaacttttcttgtatctggaaaattccattaaaaaacaaaatggaacatattttatactaaattgaaactcatcaacaggaagcctgtgataccttagaataaagaacattacagggttgccattgggacttcacatcgtttgagtttctatctaataggtcaatgactccactcatgtattttctttctttagtattataattgaggttcctatataaaagtattatgttgctttattgatttagcaacataattcttccctggaatgcaaacccaaacaaatattaaaatccttctctgaacacaccatttttacaaaggaaggtattaaagacaaaagaaataggagggagagaacaggtcaaaaattagtggaaacaataataatgagaaaagaaggaaagactataaattgcttttctttttcctgatggctcaagctattgctctattcttggttaaaaaaaatcttcaggtgaactctagtaaatgattgccatttatcatattgtgaaatttgtcacatgggtttaggtggtttattgtgttgtatgctgcagataaatctacaaacaagcaactgtcaccatcacactcagattcattttctgtatgttgaatggtgtttttttttttaaaagcattacttggccagttacaacttttgtgtagctaaattggctttgtctgaatattaaaatattaagtatttttcattttaagcagcagaaggagtaagttatgcataaacaccacaggaggtcagcttaaatttctttggaccacatgcagcttttgtggcaacacagaattattatacccgtttgtgcagtgataggcatttaggagttgaagaatggatattgaatggagaaatactttaagttgggatattggcccaggccattttgttcttttgccacatacagattgttttgaggttatgtgttctgatattcttccatgccaaaacaaagaacttgaatgaaaattctattcttatgagaaaatctagtatctggtcagtattgattatgactcacctgtgaattgttattgagcagatactcatctactggatctctggtacctttgaaggcattcttccttctacattttcttggccccagactattcacactatttaaagtgtttgttagtttagaaaccatattcgtgtacatggtagcttttcttgtttattgatgggaagattgccatctctgttagacttatttgattttatagaaatgcttaagaattttggtagccagtggctcaaacattgagatccacaattaataaatgggacctcctgaaactgagaagcttctgtaaagcaaaggacacagtcagcaggacaaattgctagcccacagaatgggaaaagatattcaccaaccccacatctgacagagggctgatcaacaaaatatacaatgaattcaagaagctagccaccaaaaacaccaaccaacgcaatcaaaagatggagtacagaactaaatagagaattctcaatagaggaattcaaaatggctgaaagatactcaacatccttagccatcagggaaatgcaactcaaaaccactctgagataccatcttactcctgttagaatggctaaaataaataacaccaatgagaatctatgctggagagaatgcggagaaagaggacctttcctccattgctggtgggagtgcaaacttgtacagccactttggaaatcagcatggtggtttctcaggaaaatgggaatcagtctacctcaagatccagcaatccctctcttgggcatatccccaaagaatgcacactcatactaaaaggacatatgttcaactatgttcatagcagcattatttgtaatagccagaacctggaaagagcctagatgcccctcaagtgaagaatggatagagaaaatgtggtatatttacacaatggcttactactcagtggaaaaaacaatggaatcttggtatctgcaggcaaatggatggaagtagaagaaagcatcctcagtgaggtaagccaatccccaaatgacaaacatgttatatactcactcatttttgatttttagacatagagcaaaggatcactaacctacattccacactgccagaggagctaggaaataaggaggaccccaagagaagattacacagtccctcaaagaaggggatgggtacaagaacccctgaccaaattggagccctggggcagggagaggaaggagagtctttatctagttgctgttcaaagcagaaacagacacccatagctaagcaccaaaccatactactggaattcagttgtagagagggaggagggttgaacaaaggagccaatacggggatagagagacctgcagaaacagtggacctgaactattgatagaatggagaccctagtcataaagctggggaaacagcattggaccaaaccaaatcctctgaatgtgggtaccagctaggagtccaagacagtctatgggtcctctaacatcagagccagtctttatccctagagcacaaatggagtttgggagcccattccctgtggagggatattattgcagcccagatacagcaaggagggtctagaacctcccccaaacaatatgacagactttgaaggtgcttggtagagggcctcactatcgctggggaggagtcaggactaggtggggggtgggttgggtagggaacatgggaggatgggtgggagagggaatggggggtatggatatgtaaatatgagtaaacaaaaataataaagaaagaaagaattttggtagcatgttttaaaattttctttttagaaaatagggttgtttatttttccccctcacataatatatccgattacagtttcccctccctctactcctcccagtttctccccatctctcctttgacctgtatcctcccttctgtctctaattaagaaataaacatgcttccaagagttaatagcaaaataaattcaaataaatagatgtggacataaagaccacttaattgcacacctaggaatcccataaaaatactaatccaaaagcataatatgcattcaaaggagctatagggaaaaaagagaaaatgtataaataaaaattttaaatggcataatgaagaaaatagtattacatatgagacaaggcatatctgaaaatgccattgagtttgttttcatttggctatctaatgctggacatgccttggacatgcatcctacccttaagggtagtttgtttctccagtgactcttccttggagaaaactaattttcatttgcaagtagttatcaattggagatagcttctggcttagggatgggggcatgtgtccaattctcctgtcagttctaggtggtggtggcattttttaaatttaatttatggtctccacattttaaataaagctatctgtttgaaataatatgtttctgtttccagtgcccactgtcatttgatacaatctctgaaatacaggaattttttttctaccctgacagtaaattcttggagttccaacctgtgttaaaaatgataagtaccatgagattattaatttcgtgacttcatacagcacagcctcctctatcttagttttttaaagatggatcttctagcatgttttggagacacatatcaattaacattactgcagtttagcccctttggttaagtatttctttaataatattattatgtcatgatgctttggctcactattctcttctaccatctgtgttttctttttaactgtttctatcaagagctgtatatctctaaactgtaaagcttcaatttagctgtcaacacatttatatcctttaagtcatgttgacttgctggactatggtgcagctcatataagttttaaaaggaataaaaaagaaaggaaagggaagaaagaaggaataaaaaaggaattaagggttaaaagaatagaaggaaggaaaggaggaaggaatgaagagagggagtgagggaaacaaaataaagggcaatgacaacatctgaattacatttataataatgaaataatttataataatgcgtaacacagaaaaaacatttgtttgttatctgtcaatagttcactgtattaatactggaagaatttactatttttaccccaggttaaaataaataaacccaggtacttgtatacttcaactattttcctgtcagttctgtagaatgaaattattatgaaaatgccataggaaaaaaagacatgtgctgttatatattatatttcctgaaactcaagtttataatctctatgtgtatatactactactactactactactactactactactactactactaataataataataatagtaatgacttactcaacaagctatgcccactggaattgtctgtacatattggctttgtctgaatattaagtattttaagcaataggaacagtggcaccaatgtcatgggtgtaaccaaacaccttctgattggattaagggcccagtacacaagatggacctataaactgcacagttattaaagcaaataacatatggctagacaggtcataagccccaggggagagtctatttttctggtaatgggacacagtattagtctgactcctcataactttttataatcctttattagtacaggtctcagtccttattgaagaagcttctttttgtagatgactagtaaaccagagacccacaagtagcccaggtatggagaataagtgacagtggagttctcagccctaaaaggaacccactcttccaaggatcagggatctctgggaaagaggtagggaatactgtaagagccagaagtgatggatagctataatgaaaaatcattttctgtacacaacagggcagttgcacatatgaactcatagacactatgacagcatgtagaagacctgaacaagtcaaagtcagataaaatcccagcatggaaagtagaggagcatatggagtcctactactatctaaactactttagataaatggtagccacaggaagaaagatacatacatttctataacccataaatcttcaaagacctgtggtgatacattgtttatggtttatcaaagcaactggtgatcaaaacatcaaagcagccatactagttatctatagaagctaggaagtggtggtaggtacctttagttccaggactttggagacaaaggcaaatagatttctctgggttcaaggtcacccaaggctatacaagattgaatcagttggaaagagtaacagaactcatgcctttaatcccaccactgatgagaggtaactaagaaagaaacagtgtctcagagctggcattcattctccagccacactgaggagaggcaacagcctgaggcttggtgagagctttttcctcccaggattaaaagaaacaggattgccatttcagctggaaagaggtaagatatactgacctggctgatttgcttctctgaacatcagcttgaagtttgaaccccaataactgtttctgggtctttatttttcattttacaaggacctgaagacattcttttacaatttccttagcaaagattctaaggagaagaatgtctttaagcatctttgagaaatgacaatctacaaatgttcaggttcactcttaacagctttaccatagtattttccaagggttaccagtagcttatctcaacataaaacctccaaagttctttgtttcagcacaactgagttcaatctattttcctcttgcactagttgtgttgaagcatttcttgcctctttaattggtccactgcatttttttcttttatacatcatattgattatttttctctctaaccagggaactaaaatactaaggataaataatgcctaaactttcccaaacaagaaaatgcaggaggagggaattgcaaggtagatactaaaaagagctttcttaaaaatgcaattttatagtcaaaagactataaaaaatgccctcataactttgatttctctatttagacactatcggtgaggatgcaacacccactcttgggagggtcttcaccttttactcaactctggcaagtatacttgtctatctgtcctgttgcacacctcgtagaagcttcagattccatcaagttatcaatcaaaattaaacaccacggactaggatttcaaaaacaatgtcatgcaaacagtgcaaaacaagaaaatatcccattcccctcccacatttgtggaattttaaggtgtgagcctatagcaggacaatggtattctactcccaagccccatcccatttaagtgtacccatttaacaccctgtctctccaaatgcctccacgggtgaaggcattacaagcttgctgccatacacacaccattgttacatagaatcatattttttttctccagataattcttgaggaataagcatctgattggaatcccctctttatggattttcttttgactttttaaagtttcttagcaaaagttagtatcatgggtcaatttttaccaagcaagttcaaattaatgagcaacatttatatatgtgtcatttgtgtgggttggtagagtttcatctaagctatccccttggcatcttaatgggatcttgactttttaatcccatggaataaagccaaggattacaattttacatctggcccccatgacactgcttggttgtctataagatgcaagaagtcaggtccaggtatacactgtgttcaacatgttctatgtctgaatagttttttaaagaatttcatggcttgagagcatgggaagagggggcaggtagctacaagaatgagaagggaagaacaggaaggatgcagaggtcatgagggagcagaaaggttgagtcaggggaagaatgaaagaaaggctatgtgataggtagggttttagtaggggaggacgggagagaaaagggaattcggattgtcatgtaaaacaatcttgtttctaattcaaataaaaagagattaaaaaaagaatttaatggcttatggaattatctcattttaagttcagattaaacaaatatctctatacatattacaattaaaagtctgcattgtgtgtataattagcatggtcatcttctcttttcagtactctctatggtaaatagaaagaatgttgggctgctttatattgaattctgtggctctgggacacaaagagggtttttgtaatagagataggaatatccccgcttctgtttgtaatagagataggaatatccccgcttctgttttgtttgggtacaatgtgcaagtgtggcacacacataaccataaaggcaaaacacacataaacataaaaataattccaaaaatatttttgaaagaatcatcattaaggatagcgtttaaggtagtcatcaatctcattatcagggaaaggcatttaaggtagcatctccacaattgcttagactgatagtaactgatggaagcagaagcagacacctacagctaaacactgaactgaactcctggaatccagttgcagagagggaggtgtgatgagcaaaggggatcaagaccagactggtgaaacccacagaaacagctgacctgaataagggggagctcatggaccccagactgggaaaccagcataggaatgatccagactctctgaaagtgggtgtcagtgaggaggcctctgcaatctatgggacctctggtagtagatcagaatttatccctatcattggaatgtactttgggagccacttacaaatagagggatactctctcataaaaatcttgagaaataaaatatttaacaccatgtagctttctttacttcaatacttgtttacagtgaaaataaaattgcttttgcttttgtttttcgagatagggtttctctgtgtaacagctctaactgtctaggctggccttgagctcatagagtagattttctttccttaataaccagaaatttaaagctacataagggactttaattctacaaatcgtctgtctcttttgtgatcattccttagatattctaaggtgatattatcaccaattttctatttatttacatcaatataataaactagttgcttattgagcgtctagttagtccccacatcattttcaacaccgtatttattattacatggcattttccttaccagttgcgaagtgttttcattctacttgtaattactcccttccctattaattttaattgattctgcaatatctatctttaagttttgatttataaatatttttttatttagaaacaatcattctacatatcaatccccgttctccccccagccccctcagcccacctgctagctagggatggtgaggccttccatgggggatcatcaaagtctgtcacatcatttgggagaaggcctacaccctcgttcatgaatctggactgaaatagtactttcagggatcatttctataatttgttatagatgaaattttaaaaaatttatccttcaaaattatcagatcatttaatgcagaaatttagaggaataaacaaatatattttgcagtcttacagagattatataccaagtgataaataataataaattttagcttaaactaaccttaagtaccttctttaccatttatgcaacaggaaatgttgagcagaattgctactgttgaattggatacaaaaccacagtgtcagtggtctttgttgaaaacaaagaaagaccaaaattgttgtcaagtaaattcttgaagaaaagtcaaagcacatgtcttagattcttttctaatgctatgattaaataccctggcagaagcaactgaagagataatggtttactttgccttacacttccagagtgtttatggccaagcataatagtagagatggcctgtccaaagtgttcaagtacatgagcatatgagggacatttcagacctcccacaatcaaagacagggaaggaaagaaaatagacttggtacaaactgcctgtattttgttcatattgaacagaagaatgagcttaggctagcaagccttggtcccaatagacattatgagaattgaatttcttgtgaaaaagtgaaatatttaattttgaaagaaattcagtctatgttggtggtttaaggttgatagaggcatacttcacaattaattagggaacacaaagggagtatcctgagcagtgtccaatgtgtgccttgtatgactaacctgtgaatgctgacaaggagaagtgattgtcctattatggattacagcatcaagttgcaacctgctgctttaggaggagaacctgctttaatcatggcaggtgagcttcatagagcaccatcaatattcatgattataccagagtaaacacatttcatttttctgtatatccaataaattgtgtatgcagacagaagatttatccaccattaggtatggaagtaatttttctctatattatttctgtggtgcttgctattgttccaataatgaagatcaagggaaacatgttagaagaatatatctggtatgctgaatattattttattcaaatctcatcatattttacttcagcagaggaaatgaatagaacagtattatacaatgaaaaagcaaatgacactttcttctgcttttgtcattgtcattttttaaaggatttatgacccctggttttagatattactttctatctgaattgggaaccatctgctgccatgtcttcattttagatttttgctccagctatgttatgaaaggcaatgaactggtgagccttatttcaacatccttgaatttatcttccagatgtgtctctcagtttgggggtttgagatatattacttccatggtttttcacttatagcttatatttactgttagagagtttacctttttgtgttaacttattctcatttatggaccacatagttttaccactggatatagcttagaatgcatccatgaccaataatcagataaatgacattgccttcaagattcactggctcttaaacttaaaattccccaaatatacttttaaaggcatatttaccatcacacatcagcatagtttgatatgagtatatagtgtgaactttgatcatatgcttaatgtgacaattcacctttatttactactgatgtttcttcttcacatatggaaatatcccatgagtttatactctcaagagaaattcctatggaagctcatccaattataagagaaaagaaaaatattacgttgaggtattctagcttttattctatatttctatagggtatactaattttctctcttggtcttaaacatgtttccatattggaagaaataatgttgtttatagttggaatgcttttttagatcttgcccagcagatctatcagaaagatattctttgttttaaataaaaatcatccttaagttggagctgtcattatacattagaatgcagtgggacaccatggaaagagaataagaaaatattactaacctggtcatccataagtgaggcctgaatgcccttaagttcctgccctcctactcatccatgtgtctatcagaccattgccatctaccagctacttaaaatctccaaagatatcatgtttgagcagaagctttgctttcattcttcatcattaggagctggagattctcattctgctggccccgggctgtctctagactctcattgtggcttctcattacgtattacatgatatccctggtcctaagcttgactgtctttcatgcatttcagttgtccttcaccatttcttctatctgctgtaagtctgtcctcacaccgttccatgacctggggtcctttttattatctgatcctctaggagataccacttcaaaaacaaaacaaaaaaatccttgtcctctgaaaactttcagattattccagaaccaaaatattctttgcttttatcacaattcccaacactgtataccacagaatggctttaacattgatgaattctaggttaatggagttagtggactataccacagaatatctaatagataatatctaataagtttgcattcaatagatgctattaaatgcatattaatgttcatatggcttaggtacaatcaaacctgtccaagaacaatctggactgaatttcttatggcttagttcagcgtttcttgctttcaggcactttcaatttttttttttttttattgaattgtgtttctattggtctgtaaaatatcttgacaacacttatgggagaaaacatttatttaacaattccttgttatagatcattatctcagaggagaaactcaagcatctagtcatattatatctatagtcaagatacagtcaagtaaaaatacatgcatccttgtttatgtgcttgctttctcccagctgagttttttctaatgtactggtcaagacccttatggaaaggtgccacctctaatgggctggtacttcctaactcaattagcaactaatacattctctcagatatggccatagaccatctgatacagacaattctgtttattctagattatatcaagaagactgttaaaactaacacatgagtccttttagaaactttaatttttcattattgatctccaatgaaacaatgatacctcagctgtactgcacttatgcaacaataaatctttataccaagccgcctgagccccactgccgtgtgggtaccctaaataacatacaaagatgattattaggttcaatgctactggccaatgactaggatttcctatctgctatctctgtctaaaatatcgattaatctatatattttataaagacctatctgattgaggatgctggcggcatgcatactctcttgtcatgctcacatagcagctccctgagaagagaggaggaggaagaggaagagagcgatttccagcttgtccctgcttatattctgagtttaattgctatgtcacttcctgcctggatcacaagacttctctttactacatttcccagaatactcctcaactcctactcctgcctaacttgcttccctattggccaacagtactttatttatcaaccaataagacaaacatatagagaagcacttcccccatcatctcctcttttcgttctaaataaaaagaagggttttaacattaacataggaaaatatataacaaaacagttattaagtaagaactatagttacaatattcagttcattaacacttagcaagatttaaagaaaatattctatcatctatcctatctttgtgagtctaaggtcttataggcaacttatcttttataataactaaagaaaactataaccataactatctctcttcaactccatcaaagaccacagaaggataatatataaactctagaattgacagagacatctcactacctggacagtcacccaaagttcctctgtaacgttggggcatccatcttcaacctataggccacagtgtatctggcagacttctccatgaagcaggaacccttcaggactgttcatcttgttttgtaagttcagcagtcactttcatgtggttcatgcatgtccagtttatcaaacagtccggcaagagcatcttcttgcccaaatgctaatctttccatgttgaaggcaaactctattttgagtttcttcaatgcctatcatcctttctgatgtaattggtgtgccagtagcagttgtatctcactgtcatgaaaaccctaagccatttaaatgccatatattctataggtcattgaaagatttgaatatccacttcaaatacatctctgtatatctagaaacctaactaacctaattataagttctgactattataggttactatataatctgtatttaattatgcattacagtttaaaagtttaaacacaatacctaaacaagaggagaaatttacatataacaaaattaaccttaaatttgtatcaataaatgaaaatccataccaatgcaaagtattcatttctatatcctattttcctctaaaaagagattgactgtgatcattaccatttataaccaaccccatttaaatgaaaacaaacatttatacacacatttgagaatttgtgcattgtcctttacaaactgcttcctgctagttgaaggctatgtccataccatgggaatcatgataaaacagagaaaccaggaaaggaccttgcttttgtagtctgcaaggctgcatcatctcagctgttttagatgttggatcacctgggacactgtttcagggggtcttgcttcatcatcaaaccatattagtctggaaggaatccatagctttccattttctgtggaaacataagcaaaaactcttttcccaagtaacctatccttatatttaaatttagaagtcaaagcattgttaaaatatataagttagattaatttagcagcattgataatcaaatgtcttttagcaggtgttgctctttcctcagcaatcaaacaatttaaagacaacagtataacatatagcatccagactctctgaatattctatctttacatggcttttttattattctatttcttttacttccttctttattcttttttttttgacagtgtttctctttggaaattctcctgcttttgcttccttcagcaaatcctacagactgtgccaccaccaccggcttctctttatttcttttaattactttatcctgtttcttttccttcacaagcctacatatatttttaaacatagtgtaaaccttttagaggtttttcttcatctaaatctgactttactgtaaatctttccctttttcaggccatgtagtcttatatctgctaaacagcattgctaaaacaaaagcggcagcggcggttttagccactgtctttccaagatagtgggggtatatttactgccagcactgagagctgttatgataaatctttctgccaaaagctgcctgagccccactgccacatgtgagcttttgccagccacctgcctgagttagggcccaaatgaatacacagaaacttgtattaggttcaaagctgcttggccaatgactatgattctcatctctagctaagtcttaactatcataaacctatatattttataagacttatcttatcggatgccttattggcgtccctccttgctggtggatcacatcatgccactggagcaggagccgaggggaaaagaggcatacttcctgtttcctcgattagatatgagtctccttgccatgtcacttcctgcctggatcatcacttctttactacatttcccagaatcctctttgactccagtccttgctttccattggccaaacagtattttattcaacaatcaataagataaacatacaaagaagtacattccccatcagagagctatgctcatcacctggctatgctgctattaaggatcatgctgctggcttggagatgtggtcactacccctggcagctgatcatacacaccatttaattgttagccgggcctcttaaaaagagtcctgtggatttttctgcttagtctgaatcaggaaacctctcttaaaggagccactagagtctctgcttgtctctagcaaaacagagactgcccgagaaaatgctgctaccaagaattcatgcttgtccctgttcttttgcttctaaaatcgctttttaggcttttgtgaagtttttatgtgaaagttcctaaaaccacatcctgacaccattttgtaatgacaaatctttctgccaagctgcctgagttctgcccaccaccattttaagctcccaagtaacacacagagacttacattaggtaaaatgctgctggccaatgactagaatttcttacttgctagctcagtcttaagtatcaaccataattagtaatctatatattttataaagacttatctgatagaggatagtggtggcatgcatcctgtcttgtcgggtccacatggtggctccagagaagagaggaggagagagtgatctcctgattgtccctgcttatattctgagtccacctgctatgtcacttcctatctggatcacaagacttctctttactacatttctcagaatcctccttgactcccagtcccacctaacttgcttccctattggtcaacagtattttatttatcaaacaataagacaaacatatacagaagcacttcatgcatcatacttatgtttgtagcctatgtggatctatgtttggtaggacaaaggttgctttcacccgttattttgcaagcgaccttgcttcctttgaggaagcaaaattgaatcttcttcaaaaccatgaacatttacaagcagaaaaatctctcacaggttgtgatgtggcacaagaatgatttgagctgtgtctggagagaaaagaaagggtaatctggtatttatcaatttttcaaacaccatgttttgttttttgcaaatattacttcatgaaatctcattaaaaccatgaaaagtagataataatagttgtctgaaatttctgcaaaatattgttccctcaattcattagttataatagatggctctgctcacacttggttatattagttatttccattggagtgctccccatctcagtgtcagctgtggttttctgtctgctcgaatgcctcagaataaataagtagcaagtacccctgactctgaaaatacttgctgtttgctattctgaatttcaactctgggattatgatttattcagttctgtgcctttaataaaactggaaaactgttattctgtcacacttcccctctaatgatcttataaataatagtttgggactaaagttagagctcttccctttgaccatatataatctagttgtacaataacagatctcaacttcttatctgtctgcaaattgaatacctaaaaagaaaatttttatttggtctaaataattgtgtctgttgtatttattccttattgataatatttgtaaactatagtatgtcttgtatatttttattaataatatgactaacatagtttctattaagattcacttcttgagcacttgtgatttggctcagcagttaagaacacttgttcttgcagagaacttaagctcagttccagcacctacatagtaattcataaccatctgtaattccagtcctgacaaatttaatgtctttttctgaccaccattggtaccagacatgcatgttgcacacatgcatacatgtaggaaaaattgtatatatacattacatatatattatatttaaaattacttggttcttatccttcccttgaacctattcattgactcactatagttagcattgcttatttttaatcacaagattgtcaccaggataagtaaagaaaatgctctacacagcacataatgaaaataaattattattttataatttttattacatactagtactttgtaaaatatcattgataaaactaattagaagtattaagtcaaattaactttacattttattttattaagcataaatacattatcttaagatgataatttacatttgttagatttgggctttaatatgatttgtttccattttcaaagataatagaaaatgaaaggtgattgaacagcattcatagttctttttttttttttttggttttttgagacagggtttctctgtatagctttggagcctatcctggcactcactctggagaccaggctggccttgaactcacagaaatccacctgcctctgcttcccaagtgctgggattaaaggcgtgcaccaccaacacccggtacattcatagttttattatgaaagtttacaatataaaatatatatgctcaatttttgcctcagatcagtcacatgctaaaatttgttgaggtgaatttaattgtacaaagaaagaaattaatggaatgaatgaactagaagtgtatgacatcagtgactataaatagatttttggtaagcttttgtattcatactttaatctcttcacacatactttaaagcattcacacatgccttccctgtctcctccaaatgtgtaagaagcaccataactatccatttgaataactatccttggaatcctgtgggtccttccctattctatagccacatgtgtgcttgttttatcatgtgtagtagataataataataatacactcactgtctatgggtactccattttttcctgctcattcttatgtcatggaccaatatttaatgaattaatggatgaataaaggctctgagagattatttccttgtttcactgttatttttgtttgattttttacttttgctttttatgttctctctgaacagaaaatggcattttgtgttctttccattttctccagatatttatgatagagaacagaagtacaccatttccatgtaatagtctgtcagtgctgctacagacatacagatgaattcagattgtcatagcagttttagctcttagaatgttggttgctcttcattaaccttccatatagcatatagaaagacagatgagcacgtagatgtcctgtggtagaaatgccactcaagttccatgagggttggattcactctggtgtctaaggggtcatcaaatttctaggccatcacttacttgagttaagaacactgattttcttcaaaacacaggcgtttatgattgcctttaatacctattgtggtcactccatttgaagagttaacttccaccacagatgctcaccttgaacttacaaaggttcattgataccgcagaaaacattgcctgcccctatggaggaagttgtttttactgtaatgtgcatagaacaaacatttcacaaccaaaaaaatgatgtgtcagtgtcaaaatgattaatctaaagtgctaaagaaatgtctttcttttctggtattcgagatcaaattttgggtttcatgcatgctagggaagaacattcccattaagctattatctctccagcccttaaagtgaaaaagaaatataaccaactttttacaagataaaaattattagtagaatcacatgaagcagaagtattaaaaatgaaataaaaaagatgttttgactggaatacatacctgaacaaaatgcataagcagtggtaattaagtggttgactctattattagaaattcaatagaaaacaaattacagtttttattttgacataattatatttgactagaaaacacaattaccttttaactttatacaatatatggtaagtaaagacatcatagtggttgtttataaatatttttaagtgcttttccaaataccatattgttactgaaaattcaatcagtgcttgagtaattccacactgatcttggcattgaaacagaatatgccatactttcatctatctgcatgtaactataagtcatatcaatcatgagcttcttcagaacctaaatcccatacaataattagattagtgagtttgtagaaaaaggaaagtgtcaagaaaggaagtttaggaggcaaacaatttttgttaaacactttcattttaagatggaggaagattgatttagactcacagttttggaggttcagttttggttggttgattctgttgcacgttggatttgtgatgaagaatcacaccacggtctacagtatttcacagaggccagtagagaaataagggccaaacaaagccccactatcttcatgaagctcatgctcctacttatctcacctttcaaggatacattacttgcctgtagtgccgtgggttagaaaacaaatcttcagcaggtggaccttgttgacagttaattatagaacatcactattcgtgttaagaggtagattcactctctgaagggtatgaaaatgtttggtccaagtttactgtactcacagatacaaactcaattgatataaggataaaatgttcagtgcttaaaattaagaagtttgacagttgtgtatattaagatgtaattagcagtgttttcacagtagtggagaagaaatagcttcacatggatctgtgacttctttcaaattttttattcaaaattagaaattaatttttattttttaattgatctctctctctctctctctctctctctctctctctctctctctctctctctctctctctctctctgtatgtgtgtgtgtgtgtgtgtgtatgtgtgtgtgcctgtacatgattatagatacatgagtgtaggtgcccatgaagtacagatgcatctgatattttggtcctggagtcacaggaggttttgggatacttaatgagtatgctgggaactgaattcaggatctctgaaagaggtgtaagtgttcttactgccgagccatccctcacactgcattaattactatttcttaatgtacacagcaacttaggaaattttacccatccagaagataaagacattaatgctaattaaggtttgtgataaatatttcaatactaatgagaaagaaaaattttctacttgttttttcttgttattttctcacttgattttgtgcttacatatttttaactggggtccttggataaaaagacataatggtcaatatacaggaatgcagggaaaattatgagaaagccatgaatgtgattattaactagatatttaacatttttcatgtcactgaattaaaaaaatatgatgtcaatgaatactaaaattgtcaagacagataaactggtcagaaattcaagcacattcatgggcttattattcaatagagaccataatccacatccatggaaatgaatcattcagttaataccattgggatgaatggttctattaacaatagaggaaataggccgggcgttggtcgcgcacacctttaatcccagcactcggaaggcagaggcaggaggatctctgtgagttcgaggccagcctggtctacagagcgagtgccaggataggctccaaagctacacagagaaaccctgtctcgaaaaaccaaaaaaaaaaaaaaaaaaaaaaaaaaaaaaaaaaagaggcaataaacaggcaaaaattgtctactggggacaaattcgtctctcagacttctatgagggtccaggattaactaaagatcagtcatggcacaaattaaattgcaagtatgaaagcaaaattaagaagagtcatggcattaattcagagcttaagatgaggcaacagtgatataaacttcagaatctgggttttcaaagaaaaatgtttgcatcaaagctggagaagtggctcaatgattaagaacacaggtggattcccagatgtggtgggtggttcacaactgcctgcaacccttgctgcacaggatctgatgccctctgttggtctccgtttgcaccacattcaagtgcctataatcacatacaaattcacacacacaaccataattaaaataaatattttaatggttccataaattaattaattaaaacaagataatggatccataaatttaatatctatttttttctagtcttcctttatgtattaaaatagttgcattgtactgtcttcttctctaggcctgagccattttatcattcttttgaatcaatccattttctgtttgttttttatatatgcttattttaaatctgacaaacaatgaatttgattttttgactaatatgttataggattctgctggctttctaacatcagtgttatgatatccctatggtggtttgaaagaaaactatctcctatagactcacatgtttgaaccctccctccccagttggaggtgctgtttcaggtagatatggaacttttaggaggtgcagtcttgcaggaaaagtgtttcactggatgggatttgaaggtgttcagccctgttttctttgtgcttcctgtgtgcacatgaaatgtgatccttcacacctttgtggtcatgccttcctcactctgatacatgctgtgcctctggagctaagtcaaaataaaccctttctccctgaccaaagacgtatttgattttttacataaattacaatctttactagataaaagataaaggcaaaaaatttagagtaaattttaaagatacccataaaacaaaaatagaagaaaaataatttctattttaaaactcctagacactaatgaaaagctcaaaattttcccttgagtctggtaaactcagttagtgattgagaagaaaaaaataaattctgaggccataattatagtctcccgctgtgagtatatctaatgctattaaagctgttttaaaagacaaacatgaaatgatacatgttatgtcttttttccttaataaaaatgttcaaatgacatatcttataatgacattgctgatctgcctaaaagattaatggctactgaaaagaggacaaggaggagaagaagaaaaaggaggaggaggaggaggaggagggggtggaggaggaggaggaggagggcctgaaaagtccctggtattcttagtttctttgagtctggaaaaacatacatgcaattttcatatggtatttacaaattctatacaaatttaaatgacataacaattacatagctatggggtgtgaaatacattggcaaatatttgtacagatcagataaatagatgggttacagaaagatgatttatacacaggtgccaatcatagagattttaaatgaaattggattctaaaaagttgtaatgaatcataataagaagtgaattctatatgattattgaataagttatattatatacatatagttaagctttaatagaatttacctgatttcaagttatagtttacaaatatgtctatgctgagagaggaaaagaatttatgactttcaagtcagtcaaaaggagaaaagatttttaagtaattccataaaaggccagaaaaaggaaggtgagttaaaaacgtgaaataataaataagtacatcaaaatatattcatataccataattttaataaatgctaattattgaagtacaaatgggtgatgtctcatatttttgaatttgaaagattttttacataactcaattttattcaagtgtgattagttttagtggaaaaccctagaattaattgggttaagaaccagctacgtatttacctgacagtatttttgaacttaccatccacacccagcaggaataatctgcaacagtcatttgggatggttatttatggaaaatgaagagtggctagcatggtgtctcatggatatgggatgagagaaaaactttccatagagctgaaatatggagagtttgtgtggtaacatgagcagtctcacttaacaacttgatcaaagagtgcctggtgtgtgatggtgtccccagtaatttggacagtgcttgaattttcaaatactgtctacattttcctgacatgagaacttagcagtacatgagtaaataggagatgcattttcttcagcagtaagactcagtggattctttgctattggtgccatttcttgaaaataattaaggtgataaaacacccttttggatgtactagtaataagttgagagaattagatgtattgttgggctggggccagggggtttatctcattctctgtgtattataatacctagcacatttttgatactaaatgaatattaataataagagctgtgataatttcaatttagctttctatatagaatacagatgtagcagaaatttctgctgaagtttttctcataatgcaaattttgagtaatatcctggatttatccctgctattgactaaatctatgtgctctagcaaattatttaatatccctgttcctatgattccatctataaaatggggataatagcatggaactgtttaattatttagtaatccaggatgctgagatgttttattcaagttaattatatgaaaactactgcaagttctgtccactatttaatgtgtttatttgattttgtatgatatgtcctaccaattatacctggaataataagcatgggtgagaagaaaatgaattcaaagtgtctgaaccttagtggcaggctaataagagaagttatttaacataatagaagaataatccaaagttgttggatatcattccttgaatatgaaaaaatacttaaggactattatgttcttgatatccagtttaagagtaattgaaaatttaaaaattgcccaaaagtttataatttgtcaggcataactttttaaattttatcatattatagaaatagtttattaatttatgattttagattaaaactgtttattgtgaaatgtgatgtttcaaatataaagtgtgtacatgaacataacaatagaattaatagatgaaattttattcttaaaataaaaggtaatagaagataattgagttaatgtcatctcgtgcatcacacactccattatacagctaaaacagtctgtatataattcatgcaagaaatgctttttaaaaatttgctcatataatacatgatagaatccaactgtctaaatttgcatgtctagtttagattctttctaattttcctcatgaaattaatgtaattttttaattaaaaagtattcctagacctctccacccctcccctccacaccccttccctgaatcattattttctctagacagcacagatttgtttcaggccttcttagctttggctttgtggggaatgcagctaaattatgctcggatatccaatcctctccatttcttacataagacagcctccacattttagctgcacagataattcagcagcatccatttcccagattctcttacaatacttacatggtgtacaaacagcttctgtctaataaagggagacagaacaaacaggatagaatttctcaaacattcaaagaggaaatcacagtgtactgagggctttttatctacttttacttcacatttccactaaagtggaggacattttgtgtacctcaatcttgtggccacaggatgtaacaacaggatagaaggatcctaggttgtgaatacataggatcattggatacatattcacagatctgttacatagtttctggaggacagagaaaaaataaaaatttaagaactccttaaaaacttctttaaatgtaatacattataatgcatttcctttcatctttataattagcatctcctggcacttttatttttaattttattttatgatttacttattttgttttatgtgtacttgtgctcctggaggtttgagaagatatggttatccctggtactggatttacagatggttgtgagttaccatatgagtggtgggaaataactcgggtcctctgcaaaagcagtaagttcttacaactactggccctctctccagtttctccaagacacttttattttactatgcattgccatccaatttaaataaaaatccaatttattattaatatgattagtgttctttgatttaaaatgtctatttcaagtaaaaatgtttgagattttaacttatttgcttaaatgtaaaaatcaccttgtgtgtcataccttttttcttatttttctcaaaataaataaaatatagataaatacatcaaagaaacaatgaaatgttgaaggaaactagtactggagagtttttaatctcagttcttgataaaagtccacatgtatcaacacaattaactataggccaaggagctctgggtgtccttatctttgcttctcttgtgtcattttaacatgcagtagggatgggcttatgggtggtttaaccaatagcagtgtggagcaaggatttcatagtttgcatctcttataaagtattggattttttcttctgtatatgaagcaagtccttggttgtaccaaaagcatgacctctcttggactgttagtagccaacttacacttatacaacttacagaaaaacaccaaaaaacaaaaaacttaaatggctcttgcttcatggcacccatcaacagtcatgaagattctatataaataagataacaaataatgacagcatatatatctgctcatacacttcccttttaaaattggacttcactgaataaacataaattaaaaatacttactaagaatttcaccctgtttctggctttccagatcaccctcctatgatggtgtccggtcctgactctgatctgctttttgaccttttaatattctggctattgattaaagctgtgctatttgaaggctaaaaggttttcactagataaagcacatacctcagatctaatatataataaatccaatagcaaatgtagtcaccattatgaacaacagtgctataataattataactagcactttattggtcacaaatgtctatagatacttgtgaggtatccatacttttgtggcataattaactcatatgtcctagtttcatctgcatattcttgaacattattaggttaagtttaaaaaatccaattaaaaacaactttgttactttatgagactaagcctaaaaccccaaagcaaacatagtttgttatagcagaaaatgaaatatcacacacttttaagtacagatacaaacagtcaaatacatcaagttttggaaaaagttactggtgatattaaggaactgcgattggtatgtaaaataagattgttttaaatttaaacaaaaattaatttaaaaaagctaccagagcgctcattagctccttgattaagtagtaaaacatatttcttcaaaatttctggtaggtccagggagattttccagttacaagaggctccagtgtctcctccccagcatagtaattcctaactgtagaataaagcaactgggaatgtatagatgggcaaagttttggaaaacagggaagaaaattaatctaaaaaatagaggtggattgctcagtacataggaaattctggaaaatcatacattccccggggatggacaggttctcagttagtagcatgattttgcctgccctgaaaaacatcaaggctttgaactgcagcactgtataaacccagacgtgttgatacagggcttaattcctggacttgagagtagaggcagaaggataagaagttcaaggttgttccacagtgagtttgaagccagcctggtctatgtgagacttagaaaaaaaaaagtgaaaagaaaaaaaagcactaaaataaaacaaaaaaggtaattcaattagaccctttttaaatttgtgtgagtccctcaaaagctggaagcaaatcttggattgcaccccagtgattaggaaaatgattttcacccagtggataggtgtgcttgtttatcctttctgtgggaaaaaagaacacaggaccaggtgaaaaatgaagcgaattgagaacatactgacaccctcaaataaccatcaaggatttagaggccaagtcttaaatggtttggacatctggtgaagtaacacaaaaatagaaaccccagtaggattaaaaaaacaaaaacccgaagtagaaagagatctagaagcagcccttgaaaaatccctgaagaagcagaatagagaaaagactttaaatagaagccgggagcagaaaattctgtatcttccaggagtttgaaaaggtgtaagggtttctgtgcctgggaaggtatgtggaaggtctttgttccgaataaatggagggaattacaagctacaacattttaagcacactcttacaaacacttgcactcaaaccccattgagaagtcatcctgtgttacactgccattgtacttcgatgttgtcaatggacagaccttctagactgtttctcagatgtttaagaaattacaaatgtctgggaaaaataccattccgaaacactgacatgtttaacaggcaatatggacactagaactttagtctaagcaacctttttagataacgctagcatgagacataagcaccactattagatttgttaatattgagttattaagtctaatgtattgtaacctcttttttcagtgttttgaaagacatgactgctatattttacagtgttaggcttgtcttataatttaactggcatttccatctttcctaaagtcttgaacaaattgcttgaattcactgattaggactagtaaagaccttctatttgctgttgtttctgtggagggatgcagatctgaaaggaagaaagaaaaacagactctgaattgccagcaaattgaataaatacaaaagaagtctgaaagtcgctgactaagccagaatgtttctcacaatttgatttaattatagttgttttgcgtctttgtcatatttttattatttcttggaatcagtgagagatgtaagggggatttgaacatggaccactagacagaagacaacatgttttattgatttctcctaatgataacctcgtatataatctgtgatttctcatgtctatttacacagatgtcttgacaaatgttctttctgagagaaaagtacagtatactatcttatttcagtgatgacagccatcccaaatatcccacaaaggtccttggataaaaacctggccaccatcctacagtgctcccaggatgtcacagagcatttaggagatagaaactagtgtaaggaagttaatttgctaggagcatggcccaatgtagaatagtaccttgacccctctccttctctaccctctcctttgatttttggtttaccaattttttacacttttttccccagcctccatcaggtgaacagctttactgccctaaccattccctgctacagtggtgtgtatcaccataggacaggccccaaaacagaagagccaatcaactgtgtacttaaacccgtgatgccaggaagcaaaatacaaatttcctccatgacatttactttctcaggtgtattatcacagtgatagaaattgactggttttgtcagctttttaactagtcaggatagcacacacagaagcagagccttttcacaattggaagggaagtccctgagtcaaggaactttaggagatttgttttgaaaactgtattagcttatttattaaattttgtaatatttttgtagtaatgcatgaacggcagtggccaatgatagaagtagatccaccatgttctaggctatgtggcagatctggtgggtgataagtggactactctctcatttatcaaatctaatattttctcctggatattttgtagagatgctctacctagtgtggtcatggaataaattccatataattaccatgtaaatgcttacttctctgattttcttaatcttacacacacacacacacacacacacacacacacacacacacacacacacacacactccaaagctgaagagatttatagttagaattgttaaccatcttgacgaatcagtccatttactgtattgatatctccagtctctaagttttgacttaaaagatgttatgcctaatagaaataagcatttcactgctaattttataaacatttccacaacatatcttctcctttcattccttcactttcagtctttgtgtatccttaaaactgaagtgagacatttgtaggcagcaaatcttattcctgtttgtatttaaacaatcctgctatatcttttgattggaggatttagaccatttacaacattaatccattaatcttttgcctcttcttgtaaggacattaataatgttctttaattacttcctatgatcccacttctaaatgccatctcactggatatataggcttcagcacatatattttgagcaacacaaattcactggacagcagaatacaaaccatttttatagcatttcaagtattgcactaaaatataactaatacattatgctgtacacactccataaagaacaggaacaaaaagataaactactttgcatttttaaataatgtttttgtacactcttaaaataatcatacaatatttgattctctacctttggaaaaaagctaacatttgtcatttgtgtgttctaaaataatttattcagtaatattcattgaatatttagcatgtgcaaaaattcctgcagagtacctggggcaagatggattgtaaataatgcttgttatctatgggagtttgatagcaattggatgaagacaagaccaaaatttcaacatataatacacaagttcatgaaagcattaatatttcaagacaatgtgagtttagaggatgagaaaactcataattttaaattttacacttttaaatgcttacccaaaacaaataaatggttttcatttgacaggatacataggggtatatgtgttctttattcccacaatgtaaatagtcaatagaagcatatatatatatatatatatatatatatatatatatatatatcatataacaatatatattacattcccaagagtgtgaatgatgtgtagggatatagggctgtatgtattttgtattccaaacagaatgaataatgtatattatgttcttagaagtgtgaatgatgaaagatagtattttggagggggctagcaaggtggatcagcaggtcaatacactttccaacaagtttaatgatctgaattctaatcttcagattcctacaatggaacacgtttacatactcctgactgttgtcctttgacctctatataagtatgctgtagcctgtgctcctacatgtaaacacacacacacacacacacacacacacacacagagagagagagagagagagagagagagagagagagagagataaagttaaaatgcagtttttaaaggaagaatattttgggctgggaaagcaattgagtgtggatcagtgatcatgtacattattttaacctgcatcatcatgcgtgtagaaattgccctgattttattttatcttcttcattctgtagaccccactgcatgagaacatgtaagcagcaaaaattcattcaagactcagtcccctgctcaaatatttctttgtattgtgtgtgtgtgtgtgtgtgtgtgtgtgtgtgtgtgtgtgtgtttagcttttaacctgaagaaagcatttcatttttcattgttaagattctgaggacatatcataaatcaaaacaaaaggggttgtagaagaaagggaaagctgtgtataacaatatgctttcagtcatctaaaatgccactctaaatgtgacatcaggtagagagtatgatgaacccaaccataagaaacaatacagttctgtcttaggatatttgaacctagtgtagattctccatgaaagtctgtgtaaggtttctgtctccttatgctatgttattaaagctcagactctctacatatcacgaattggctggtgaggaaattagaaacagagatggaatcaaagtcatctcccttggcgatcacactgctggcattattggggattgcagagtgcacagaaactactttgtgacagcacagaaaacaacaacaaaagattttccccggggagaaaaattacttttagaaaggacaaaataaagtgattttcagtttttccaaatatttcaccctctggcaacttttctaatactgttttaaactgctttcatctttgacattaccaatgtgattgaccatgatataactacgtatttgagcttatttttcttaaatacaaacaataataactaggtacctagttttaaaaatgaattgttctctgtgatggctaatattggctgtcaaattaacacacctggataacaggaaacatcagctgaggaattgctgccatctgattggcctgttggcatgtctgtagtatattttcttagttgctaattgatgtagaagtgtccagcctacagtgggccgtgcatctatatgcaggttgccctggattctacaataaaggaagggaagctagccagtaagcagtttattaaaactattatctagaactgtttcatttatttttaagtttaacatagatactttctgaatacagacaaagctaaggatttatctgccacaattttgcaaatctcttcaggcttttaaatctttaatgtgaaactagaataaatgtttaaagttttcaggcaatgatggtgcatgcctttaatcccagcacttgggagacagaggcaggtagatcactgtgagtttgaggccagcctgtctacacagatagtttactaaattttagtatatttaattttgatatgggatttgttcaagggctattgtgaattgccagtgggctgagagtatgcttttattcgttattaaatggatgcaacgcagattacaaaatcattaatataaaaatatataaaaattattacagttacaaaataatttttaaaaatcccccagtattgtttccaggttatccttaatggatttaaaacctgtagttgttgctttctaatacataagatgtctatctccataaaacttaggacatcctcctacgactttaaatcatctccacattagtgtaatgtgtatcatagtgtaagcgctatggaaatcagtgtcattctgtattgttcaggtaatactgacaaaaagcaatgtatatgttcagtatcgatgaactttatattttcaacatgagattctaataatggacatataactcatggaatccctcaatcttactctcttgtgtctaacccatctcacagaatgtatgccatttataatttttattgacacatacaaacgtataaaacatcatgagtttttatttattatgatttcaaactaatgccttatggtctattttgtgctcccaaatttgttagtttataaccttgtttccaattatgaataatcctatttctacaattaaaagaaaacttcttaaaatgtattaaaatcacaaggaaaatttaaaaaccctctctttagtgtgtaacacttttctaattaaagataacctatctcacactctcagtttacattgttttcattgccttaactctgaaagtcaccaaaataaaacttcacttgagtctatacattctttgagatcttttatttctctattaccttttgtattttaatcaattattcttattttcaatttttatttccccacttttatttatttccattattaacatgtattaatgatctaatattttgtagcaaccaatgttttaagaaaaaccttcaaaactagagagagtagacacaaagaattgatattccaaaacaccaatttgaccatgaccatggtgtcttatacccacttatatgatgacaaacacaagtcatagaattgctccacaatggtttcttagatgctattaaatcatacatataaatagatttctaaaatacttagcatacttcaaatacattttccacctttgatttatttgtatcagaatatcttgaaaacaatttgttaagaaggcatcacatgacatgggattttacttttattaggttttattttctcattctctagggaatagagctttagagtggttctgatttaccacttccttcatctttttattgtgtgtgattgaaatgaagaaattatagactgtagtacttcttcttagtgaagtttaaatttatctaagttttgaggtatatgcataattgcaagttggaaaaaatacagcagactttgcagggaaggaaactttcagccagtataactttgcctatggaactatagttttatattttactacaaaaactaaaagaaaaaaatgttttcatcacagcgaagcctttgttttgcaggatttcccctccattatttatgatgtgtgggaaggatctcttgggttatgaagagaacctcagaggtcaagttgatggctgataaaacaacatcacctcctatagaaatgggaaccctaatggagactgtgtttgctcagaagtgttcatatgtacagatacaggctatctcagggatgcagctgaaaaaaacccaacaatatcctgtaagcaaagctggaacaggagatgaagcaaaatgagctgccattcagttaggagagaaaggtctctaatgcataccagaccttctttctctgtcttcacacttgctgtgtgctgaaagagcattagagcactaaaatcctcacccagattatctgcaatttaacatcactagccttctctgggagctgcactctgaggcatttttacttccatgtgaggttcatgatggagtttttaaaagaattgttttagcattgatctgtcagtccccgtaacccatagttcttctgtgaggcattgaatgtcccagaaattcaccaccccttggcaaccatcctagcctcacccatcaagacagatgcactggaaggcagcagcagccccttggcagtacttttatttttaaaacaacataactctggttatgaatattagacacatcttgccacatttcacttgaggtctttcattgtcacacattctaccatctaaaaataatctaagttgaaatgatttaagtacaactaaatttttgaaagtatgttatgtatctcaagacataatagtccatagggtttggattgacaccaggtattattttgtactttgggatggttatactggagactactaaagcttgtgtattttcttatgtagctttttgaatattactattcagttttattttggtggagtgaagctgaatgactttatgtttataaattttctttcttaaattttatcatttgtatttaaactagaaagtgtcctattttgatttgtatatctttagaaaacataatttcccatggatgataccaaaaaaccatgaaaaggtatcctatcttatgtttgtcttactcaaaaagtaactatatcatttctaaaactacaatgacttcccagtcctctatttaaggctgcccactctcatttgtcaagggcaatgaaaagacatggagaaaacatcttagcatatgaaagcagtttagtactgaggctatagatcagttggtagaggatttgcctagcatgcacaaaggcccaagcttgatatttttttaatcactgttcatattaagtggaaataatggctccaggttgtgatcccaagaattacagcaaatttgaggctagcctgcgatacataacatactatcaaaacttttgaaaagaaaactagaactagattcaggttagatatacctacattgatttttcttttttaatcaagccttcaagagttcattaagctaggatacactaatgtacaaattataagcatatgatacatgatgtttctaactcttagtggctgtgatagtatgaagtgggatccattaattaattcaagactaaaactcaatttccttcgttgggaaacactaggaaaagacaagagatctggtctctgagaatgtaatagaaggaagaaaacaagttgacccattctattcgctatcaaaggctatgggtttggctttagcttctaatcttcctttgtcccttgagggtcccaataaggcttcttgtcacagaattcccttggaaaaggattggggttctctaactcttttgttatgctttgttgccctaccccctttcctcacttcttgtattccttagagatcattttttgttctcttcaatgtagtccttcctcctatgtaaatcatttgaatgaatctattgccccctaacttttgaactatatcccttctcccttgatatttttagcaatattagataaaggcatggcctcagaaaaccacttagaacaaataggctttgtttttccaacccttagtctctcttacccttaaagagcactctaggagcttgcacttaacttactgatgagactggcatcctattcctttctacacatgattttccaaggtagcatttctaaagcagtctgagaaaatagcacataaattcatctttattgtgctaacatgtgaagttaaaagaaattacttcttcctttactttctttttagaaaaaaaaatcattggttttaagatgggctacattaatgtaattgtttcaacttacagtttatcaaatcagcaaaagcaagctttaaatccgtgtcatttttcagccttaaaataagttcttctctgaatttgggcagcttatttctggcagtttgcagatggacagcctcatggcattactgaatgtatgcattagtacataattagatctatgtaaagataggtttagcttcatctaaatgggttaatcagttctcactgaattcaagaaaacgtagggaagctcagtgtgcagtgccttccgattgactgatgtagactgtggtagttgactgtaaattcatatgtaccccaatgagcactagttctatccaattctgctttcttgtcaacctatggaagtgtgagcattactgatcatgttcctaaagtttcattgctatttgctttgttgctttacatttgtaatctggcatttgcattcttaagcagacatctggagctgggtgatgcacttacagtttggcttgaaagggaccagggctcatttacttattagtaaacccagttgttaggataactttgtgacatttgattgcagagttattgacataatgctttttaagaaggaaaaggacattcatctctgcctatcactttgcatttctgctatctgtcctttgcttcctttgtgctgaagctgttgttcctctttgttcccaccctttctgagtgggttctcatccagccctctgccaacagactccattttcacactactcggctctcaatatccatccctggactgacttttgtatcctccttggggcatgccacagatgtcttccagataaaattctctaaacagaagtcatgattctctctcatgctgtatttccatgtcactactggcttcttccatgtcttttcaatttcacaaaaaagacaacactatctcccagctctctcaaagttcctctttacatgataatttaaactaacatacaaaatagtaaaacttgctcatatatatggataacaggtaatgacttaatacattaaacatgtttctataaaattttcattttcttatggtgaaaacattaaagactcttcctggttttgaaacactgggcacattaaaataaccacagcactgatcaactttcccctgaccaaacttcattggctatcaacctttaacatcactccatctgctcatctcatcactccccagcctctggtgcccactgctttattaaattaaatactttagattccatttgagactgtacaagacataacttctgtgctgtcttactttattcaaaacacttaaatctcagttgcatcaaagtgacacagctgaacattattccagcatgtaacacatttttattctccattattggtaatagttgaacccttactttttcttctttcggctattgtgactagtgctggaataactaagggactgagatgtctgctcaacactgacttcatttactttggacatatgcccagtgctgtggttgctgtcacatcacagatttgttcctagatacttgaggaaactccatgtgattctccagaatgactctgtcatgcctgcctgccttccccagctactagtcagtatgtctacctgtggctgctgctgttgctgacatcatttcactggtattcacactcatcttctgtagcctttcaaagaggactgatgcccattcgatctcaaaaatcctctgagcctttagctccagattgggatgctgaggactctgtcctggtggactgaacagaagctctcagccattccatggtgaagctagtcaatcattttcttagcatctttcatgtcagttaacattatagagatattacatgtatttatctgttattgggaaaaattatggaactatatgctttaatatattttaaacataaatctattgcagctcttattattatctccaattttgtcctgttgcataaattcaagttggttcctgatggttattgttatgagccaattcttctagtatttctattaggacctcgtatattcattagttcacaacctcgaagagacaattttacaaaaactctcagtaggaaatactttttcagtccctcatgtacctcatgtaccaatatatgaatggctactcctcatgactctttaagtggacaaaactttggaaagtaaaaaaatgcaggaattcattatcaatttacatttttagtattaatttcagtttaaaactcttaaacgcacatgtgttttcttttacgttaaaattcttggattctattgattccaatgtagcttttcttgttcatcctaatacacaagtatgtatttgtgtgtacaagtgtgcacacacatgtattaatgtggctctagtctactgagatcttttgagtaactgcatggcttagtctctgaaatgctgttgatcttaatttcattgccttcaagttactcaacatttctttttacttataagagatttacattttttggagcttttgttttcggttctgataaaaatgaaagccttatgcattctagtcaggaactctagcactgaacccctgtcaatttcatttacttttgctgcataattataaacaagcctaccccattcctatgaaaactacaaaatcaggtgatgagaaaactcacctccatcacaataatttccaactgagtgtatttctttttctagaaaacttgttctttaaattaagatatcttttatcccctcttttccatttaaaaacatgcttatgcatgagtggctgtgtatcaactctctgtgttcatgataaagctggcatattgtatacacctttttattttattttttcctatccatctacactaggcatggagtttttctcatttctttatagatatagtatgttttttatagataccctacaatgaattggattcactctccatatatggacctatattttcctttataaacattgttactctcaggtttaaaacccttctattgtttccagatacgttcagataaaaaataagcagctatatacagttttgaaagaaagtcctttgtatttgtgtctgttttaattctccatcttcaattcatacaattctcttcattagttatattcctaattcactggacttttcattcatgaaatacaccaagatttttttttaatttgcagtttttatttcctgcttccatctatgatgtttttcaggaccatttttcatggctgacagatcttgctctttagatctgtgaattcaagtattcctggcttaggtgtttctctccaaagaagctaacttaaggtctcactgccattcccttactagtttatgttgtaaataatacataccacagtctaaaggggtgatacgtatggaatgcttatataactctccaacactacctttgttgaaacatgtatccatctcaaacttgtccctacctaaatgtctttatgaaaactgactccttcacttcctgtcttgtgtttaacaggcttacaaaatatgtgttgaagtaaagattgaggatttcaattaatacaggacatactgtggcaaagtacacaaattcttattaactacgagtctaactgaccttttattatattattccctgagattatattttctatgctgtctgagatttaaaaaagttaagtggaaacttttaaacattgaacaatcgatcatttttattgtgcttcacttcattaaaaaaaaaaaaaacattgtaactgagtgataggctgccatctaggaagtggatagcaacattaactttatataactacactatttgtggcacaggtgattcagaaagacttgagttgtcatccacaatcctactgtttgatccgtttctttttactgatgtagttgtaaattgccaaagtttcctgtagaccagcctggcctcgaactcacagagatccgcctgcctctgcctcccaagtgctgggactaaaggcacgagccaccaacacccagcaagtttccttttcttcctcacccttctctcacatacatatgaaagaaaagtgattatagtttatgtagttttgaaactaccaagactataatggagacagagatagaacaatttgacacaatggagatctctttaaagtaaaatgaaaaatttctatatttctcgtaggccacaaaagtgaaatattctgtttcttaccacttgtggttaagacaggcaaacctgagcatgctattacatattttactatcatatcattcattagacactagatattttttttttcagtttctactgcttcacattatatccagagtattgtagtttttgttttatttcagttgaaaataaatcctgaaaaaaatgaaaacaattcaaagttatattttttgctgagtgcaagtggtcctcagtctcttaaatgtcctccaaccacagacagctataaaaccatgcaaagtagaaaaagaggggctgtgtccacgaccttcaaatacacactaggaatacttgcccaggagaaaagggaatgaaccatctgtacactctgtttttcgtgcttttctccttgaaactcattctagacaagtgtgatccaggagagcattctcatgcagagcaggcatcttgaggagatgaagagacagaatcacagcccaggggaagaagtgcctgaatgtttagtgtagactgacaaagaacgagacacaagcaaaggagattcagaaattgtaagggtgtcacctagattctcttgttgaacatgagtctgtagttactgcaaagaatcccttggggcaggagtggaatcaccagggacatagaaaccaaagaacaatcgcaatttacccaggcaagtcatagaaggcatgactggaggccccttgctgagtaccgactgtgtaactaaagcgctagaagaggagaggctcccttgagactattatcatggagcaaaatgtagagtttagaaacttccatttggcctagtgttaaaaagatttaaactgtaatccttcctttataaaccaccttccatccagagttgtatgccacctattatcaatcttctaaatataactcatctagttcttcctagaagggatgcttagtggatattagctgactgaaagtagacttttattcaatacaatctcattcagaacaaagttttgttatgttactatgttagttaacatggtatcaaaatgcataatgcaaaatagaattaaaataatttaataattcaatggagtactgagatgcctcagcagacaaagcatttaagccaaggttaatgacctgagtacactttccaggactcaaacagtgagagaaccaaaaagttatcctgaaagttatcctattactttcacatatgtccccagactcccatatataacacagatacagacatgtgcacacacacacacacacacacacacacacacacacactaaatgaattaattaaattttttaaaggaacccacaatgactccataggcaaagtcacttactgccaagcctgagagctgagttcaatctcctgagcccacataggggaaagagaacagactcttgcaagttgtcctctgacctccccatatatgctgtgacatgagtgcttacacatacttacaggaacaaaaacaatttgctatatagaaaaagtaaaacacatttttcttaagaaaatacttcaaaatagagtttagtcaaacaaatacttctagttactgagaaaatcattgtctaaatacagaaaatatgctgttaacttatgatctatcctaaatctatcctaaaatggagacattgaaccaaaagcaatttaaagaatcaaaacagactaaaaaataaagttgcaattaaaatctctctgaaatgcataaatttggttgatatggtaggtagctttagaaacctgaaatttggaaaacatttttcttttttttttgttttttgttttttgttttgcgaaacagggcttctctgtgtactttggaacctatcctggcactcgttctggagaccaggctggcctcgaactcagagatttgtctgcctctgcctccgagttctggggttaaaggtgtgagccaccaatgcctggctttggaaaacatttttaaatatcccatttaaagcaaagatggaataaatataggtattcatatgtttagaatcaaattcaggaaaaaaggctgacaataacaagtaacataaaaaatattctgtaagttatatctaccttgaaaataaaatttcaggaaatgacttactgaaagacaataccaagatgtaaaaagtgaatatattttcaactaatttagtattttagaatatcattacatttacactccattgccatttcaaaatccaaaatctgttcagtgaaaattaaaatttctccacagtcttacagttccaacaatgttcaaaggtgtccaaattcctttgggcactaaagacaatttcctaagtatgagtgattataaaattttttaaaagttacatatttgtaatatacaaaagaatgacagatccatccctacttcagaagggatgaactggaatagagtagagagagcctgagcaagaccaaaactcgcaggacaaacatacaaacctctagttccacgaccagtatctgggactcattgtgacatttcctagatgtagataggcttagcacttcatattcagctctggtacctattgcagggtgcctctttcctagacttactccacttaatatttggggatttcctgggaagatgtctcatgttctactcatcttcaacaaacttagttctccagtgtaacctgggcttcacattcacaccttactaagcatatcagttacacttttttgttgtaataaaaacatagtagcccaaagagacttatggaagggctaatgttgtcttagaattccagaggacaggttcataagggtgagggttgcactggggaaagctgctggagcaagcagcagagagatgaacatcttccattgcaaaggtgatcagttgagaagtggggtgaggctgtgaattgtaaaagctcatcaagtgatctacttcctccatcaagactacacatcatataacctccacaaacaacaccaacaactgggaactaggtgctgaaatatcggagcctccaaaaaacatttgtcatttaaaccactaactcaggagccactcagtaaatccaggtaggaattcaatactgctgcatatttcctagtatttcctaacttctctagtggtgtagattgtaggctggtactccttagctctatgtataaaatccataatcacaaaaaggagaaaatgatatgtactcactcatttcacttcttacagccttaaatcccgaattcaagacaacattgcagttgggttagttcaacctgcaattcctccatagttgtaaggatctattaaacaattgtagtccccttgtctgcatatgccttgttttatttttctgagctttaccatatctgtattttttcttgcctagttactgatttttcctatctttctgtcatacagtttgctttttatcaatataaatgtaaatatgagcactgggctatagccatggaagagctcaggcactatgttgtattgaaatttcctccatggtgtgtaacttttgaatacactcacaattaaaatttcagtgtgtaagcatcacataggcaaatgacttgctggcatgtaacatgaatgacctctagtacaatttctgaatattgttgtttccttgaaacctcaagagctggcaggacatggttcacatgcaaatctttgcagcatgtatagtttccctttacgcaagcggcattaattttcatagcagttaatgtcatggctcactttttgcagagtatgcacacattagtaaactcccttatgagggtggtttcattgttaagtctttctaattatgatccatcccatttacaacactttgcagaaagtgattgtgtatggtaaatcgtttgaagaatcctatgcaaggaggggaagcttgggtactgaacaaggagcacattttctacttttcatcattatgtactcatagggcatagctactcgctgtgtatgagtttagagagattctatatgcatgtttccataataatacgttatattaatttataatgactcaatgaaatgaatatggtacctaatatatgttggttttatatttttaggttattatccaaagaaatagataatgtataccagtaaaactaaactaaatattcctagaaatagttactatggaggagaaatatagagtacttcattattatccaagaacagtgatacagaccttcaagaagagaaaggagaaatgatatccattacctcttgctcaaggtaggttaatctgtttcatactttcatcagtatatgaaactcattaactgcttgctttgaagtgtttgtcttctcagtttcttttccagaaatatagtttatggttccccacatgcatttccactatcttgggttagattttagtttttgaaaattggctaaaacagagtcatgaagaagttgatggtttcagtgtttgatgaatgacagttactttaacactaaaaatatattgccatatatattgatattcttttaattttacagatgaggaacgtgaattatcaaatttaagcaacttctcaatattggacattcttatcttgtagatcaatgacctaattcagactccagatccatgttctttgtgaccatactacaaagactttgtgctacttactgcagttttaatctccagaaaaggaggaaggaatgaaggaaggtgggatggacagaaggaaggaaagacaaaaggaaggaagggaggaaggaaggatggaaagaagggaggaagtcaaaatgaaggaaggaaaaaaggaaggaagaaaggaagggaggagaggaggaaagaagggaggaaggacataaggaaggaaggaaggaaggaaggaaggaaggaaggaagggagtggaggaaagaaaggaggaagaacaaaagagaagaatgaaggctagaaggaagcacaaaaggatggatggaataagggataaggcaggaaaactaaagaggagggaagaagacatcatgaacagttgttctgttttgttaagaaatcttatcgttttcccggcaccaaatcttctcccactttcatgtccctctgttccatgcaggtcaactctttagttcattaaagtatgaattaaaatggagttctgcagttagagtttcacactaagacataagtattcaacagccatatgaaagataattggaagaaagatggaaagaaatggtacacaagaatggatagttacaaccacacagcacaaacttgtccttttaaaacaatgacttattttaatgtttattacaagctcattaagaagaggttttcaaactctacacattagaatttttttaggacgttttctttcattcttttctgggtttgaaaaaccatactgggatttataagtaactttgtatactttaactcactactttgtagcatttgaagtaaaacacagaattgtgacaagtttctgtacattgagattatgtagttttagcttctgagatctatatgatgttgagaatgatgagtgaagatgttgggaattaccctactcagtacaagatgaaaagcttagatttggggcattaggttatatgctgaagtcttggaatgagtcatttgatagtgaaatgctgtttgctttgctttctttcaggaaacactgtgttaagtttttacctagactgaccacttttctatttaagtcaatttcattatttaatcaaattccttgtgtatgtatgctaattagcatattacattttctcttctgaggtactaaattccttaaaaactacttattggtaggataactattgtatagatgatctgtcctttaaaaatgaaaataataattcctaggtggagaaaataatcagagatttttctagcgttttcaaagttctcttccaatagaggtaataatatatcctctgtcactcttggccatgtaggagttaaaacttcagcttctctctccacattttacgatttattagacagacttctgaacattgaatttgcaagttgttttccaccactatgataaaacacaaaatggcctttatttaatcatggcagtgtgtagagagtctctatcaagcctttcaaattgatttacaatcattattctatcactctgccaagtttatcaacacagtgtgtggtgtgagatacttacctgaggcaagtaaaatgaaataagataaaaacagctggtttgtattttaccaatagatagaaaaaaatcagtaaaacccaagccaacctgcaactgtgtcttaaactatttctgaaattatagtttacagtatttatgaaaagttgtgggtaaagtgagatgctaatagagttattttctgactttggggactgtcaccttggttgttgtcacataaactcagctggtccagaagtctcaattattccaagttttgacttaggaaccaaatttatgatatgttcaacaatgtactttgaagttctgtattttatctaattcacatctctgttgtgctatcatctgagggttgggaacctcaggtgtaaaatgcctctataaggtctgctggagtcagacctgcctatagcatattttcttaattagtagttaatgggggaaagtccagatcattgtgggtggtatcatctctggcctgatggtcctggactctaagaaaaatgactgagcaaaaatgacattgcttccattgcctctggattatatttgccttcaaatttctgcttgatttgagttccacctttgccttccttaagtgggctgcaatccaggatatgtaagttcaataaaccctttctccctcaagttcagtttggtcatagtctttcagcatagcaacagggtttcagcattgtaaccctaactaatataacatccaagaatttgaagaaaaaaatagagttggaatagaaaattcatgaaaggacataattctccaactaacaaattggcattgtttccaactaataagtggcattatttcaaaacaaacactttcaaggctgggcgctggtgtcacaaacctttaatcccagaactctgaggcagaggcaggcagatctctgtgagtttgagtccagcctggtcaatagagcaaggctccaaagctacacaaggaaagcctgtctcaaaaaacaaaacaaagcaaaaataaaaaaatatgagtattcaagatgacttgctatagccttttattggttgcagtaactttgcacttcagttattgaacagtatttaaatactctgcagactttgtaacttataatgatatgacacctcttagaccagatcaacattcctaaaaacaagaatgggcttctttaaaaccattacttaaccttaaaacactattctttttcaagtactcttaaaatttgtattgctggttacatcataacacttattaaatgattaaccaagcatttttgctactggttagctgttgtttctaatgtcctataataagtgttttttatttatttaatggtgttcctattaattttgttgaatatgaattcatttaaaatgttcattaaacagcaagtcaaaatctccttgcctctcttttcacataaattactgagtaatttaatcatttttaaaggtgttaaatgtcacaagagagcaatgacttccccatgttggggcaggtcatggctcatgggcttgcctaaagcactcttctacttttccagttatatctgaggcctcctcctttgcctggccattcatccactgggtattatttatccttccacccccacaccttttctcattggcatcttatctattcttacacctccaactgccatctgttgatagcttcctaatctgtttcttcaaaatagacttctatttcagacttgtatgatttaatgggaagcagatgtctcccaaacacctcaaatgtgatgtcctgttcccaccctctcactctctactgaaagtgcctcttcttcctgcactcccaaccctgatcattttcatgtgggtgccaattatgtataagatattctaatagccctctttagtagacattaaaaacctttagtgcctcatgctcacattatgtgttccccatacatttctgattttatgtatgcattttgggttcagtcattaattttcttttccatgtactgacaagcaactgcacatgtcttaaagttaacttacaaagtagtgtgttacacgatggaacatggtttcttaacatgattaatgtttggggccggataattcttggatgtggtaagcagtccagtgtatctctgtcctccagccaggaagattttcaactgtgaaataaaaccattccttttgataattgtcccctgatgaacaagatggccttccagtacagctgcactctttcttgttattgtgttttcagctataattttctttagtctattttctgccaaaattgattttccaaaaataacttattcttacacatcttaaaactctcctgttcaaaactctctgtgactacagattgctccagaattaaaaaaaaatagagaacgaaaacctttcaagcacctcatagcttcatctatccattttgtctcagcctacaagtgtttctgaacgagataacagttactgcctattgctttgcatttaatataagcacgcatattctaacattcctaatgtgactgttcagtcttcattccatggcagcataaggcaacttgggaaggatatttaatcacctcaaacttccatattctttattcattgtgccctatttctgtgtatctgggctacacaaaaagccatagttcaatagaaacacagtatattcattttaagcactgtcaatgtagagacttacttagaagaaaatcaaaacaagcactgcaagctgtagattttaattcccatttcttttaaattatgtgagagaaaacagagaaacaaaaacaagggtccaaccaaaacaacagcatatatttcaatgtacaattcgaatgcacccacattcgtcagaaatgccatggcagtaaaccgacctattgttagaaatctagcaggtacatttttcactgtttcccggtgggactttatgccaactgctattgattgtgaagagttctgaacttctattaggctccactcttcttttagttgatgattattttagcccccaaataagacaatttatgcttttagcggctgggtcatcttagttcttttttatttgataccaaagcagaatactttctgaatataaatatttctcctaaactgtttctttttcactattaacatctagatgattggaaaataattattttatttgagcaaattatgaaatgctcaatctaccatatgtgattgagaaaattcagtgttattcagtaatacacggggttgacaaaaatgcaggcatcatagagtatggggtggtatttatgatggaaaggaaagaaggaatggggcagcagatgcatgggctgtcacttgacctttctggtgtcataaggatttgctactttgaaatagatttaacttcagctattttattttaacttctatccatatacgtgtgtgtgtgtgtgtgtgtgtgtgtgtgtgtgtgtgtgtgtgtgtgtgtgtgtgtgccccaacaaaatactcatgctcattaggtggtaaacaatgtcatttataattgtcagtataggacagtagctaaaaagctgattctgagtttagactgtttagacagatttcaacttcccaattcactagtcacatggtgtcggttaagacagtgtgtttctgtgcctcaatttccctatttgaaaagtaatgcctgcaataatattactttccccctggaggctgtacaattaaatcaacagtccatgctaaattagaagaacaaagcctgatgtggagtagctattcaacaaacattctggtatccaaggtagtctcacaaagatgaaaattaagaccaagacagaagcagataatatttccatagtcaatttgtgatggcaagagttaaaatgcttaacacaagctggggtggatttaataaagattgcttctccctccctctcttatttaccttgttcatgacatctgccttgtggtcatatgggacattctaataccatttatctccaggtttaaattgaggctttgataaccttaattttgggtctcagttcagagtttggaataagaaatatggtcatttacacctcttcttttaattttaaagtatcttatgtaatgggcttttaatatagaatgaaatgctagttttcccagctgagtttaactatggagtgtgtcttctctgctgtatttactgttatgctgttaactgacaaatgctgctttcctatttcacttttttctttgtttgaaataatcatttttctgttgttacccatcacagtttaacactctatgcttcccacccccattaaattgatgtttttcagtgatttttaattaatgctattcataaactctagaacttttagcctagagttccaaggagaaatatattatggaaaataatactgcaaccactatcaatagtagtactaacagcacactacaatcatgaaagaactgggaggaatggcccccggggactttggaagtgttagcacagtgaaaacatacttgtctcaggctatatgttaattgtgtcaagcaacccagccaacaaagcattggctgtttaatcccctaatttgaacttgttgttttacattggctggtaattactgcccaatgtcatgaccatcctgctgtgctctgatgatattacctggttttggtgactcccactttctgctgaagtggttagtgaccactaaatcaccccacaaagaggcaaagaaactaattcgctgtgtaaaaagagctgcggatagaaaagaactcccccgttttataattcaggtaaaattccaacccacataggaaatacatggagttctctaggtccttatttctctaggaatattaaatattgtatttaaatatgtatatactccctgaagaggcaactctgcagcttttccaaaatgattccatagaatcccatattaaatgactaagggtggagatttcatcttccttaaaaaagtttgatgggaaataaaagccaaatatatgtcactttaagaatcatttagagtccacagttctatctttgaattgacatctttgcctcattccaccatctgcaacttatgcacaagaagatggtcactactttagagccaacaaatcattaaatttcattgtaacctattgacttgagacataattgtagtcatccagataggatgacaattttaagtttgttgtctcctaagtttctcatcctcaaacttttcctttaggaaaagttagttctcagctactcatataaagcactatcaggacgaataattaggcttagacagatagttatgacaagaaaaagcttaggtgctcacattttgagataagggagtgcaacttttcaagtactagataatttttggcactgtgagacactgggggggggtaagtggagtagcaagagttttggagtctatattgtaaaaaaaactacaaaggaaccaaataacttcttatgctaaagcttccttggccctgttgctgtgcaagctttttaaaaacgcactagtactaatagtagatatcaaacaaaatgagatataaacaagaacatgaaatatatatttatctgaaaaaatgaaagttgaattaagtggcatgatttaatgctgttttctaggaaactgtttatctagttttccaaatttacataaattttacccttgatggaaagaagaaatgattatatcatctacctaggtagaacagggtttctaattatttagcaattacatttctcaacaaagtgaccagtgtctatgaatagctatagacaggtatatgaactgttcttcaactgaatagaataataatacaagtataaaatagacaagtacattaaagaactaatataaaacatgtacaatatctcattaccattttaattgattgcacattgaaataatagtattatcaatacagtataattttatcttctagttttatacttagagagaaaataaaatttctcattgtgtatctaccttctgttataatctatattttctggtttggatgttgcagaatgtaacacgggagagaaaatacatttccaggatgagaagaagcatatgattctgttctcagatgtattctatattctcacagtaaagccacatctcaaggagtttctggtagcaaaagtattaagaatgtttgtgagaaattttgagatagaattattcctcctaccccagaatgtaatgtgaaggtcaaagtgacattaggtaaaggactccttgcctatcttctgtggcagctttcaggatttgtgtgcagctagtgaagaagactattgggcaaggcctgattcctggaagacaaggaccaatggtgaccatttccatccctgcccagtgtgtgacttgcacagtttgagcagcacctggtagacacagttcatggcacctcaatctttatattcagttgtggcaaggattcatgaatatgtatcagaagctaaatccccgttttctctttatccattgttagtgatcaactcctgatgtcaggggcaaaaaaaaaaaaaaaaaaaagcgagtctcaagtttattctcaatgccaagtgtaaatagtactaatatttaaattttcctcattgtctgatttaattttttctttaaagagcatttataaattattttaggttcattttctcaatcaattaactagattccactttaaaataacaaattagtctaatagcatatataatttattttcaatatgttggatatatttcaatatattggtatgagagataagtctctttacataaatatattctgcttaattttcttcttcataggggtgtttgttcctggatttgtctttggtcattttgtctatttatctcataatgtaatcttccttagagtgaatatcatctttcagaatactcttataacttttgtgtttattatttaattctaactaatgcaagggtttcagtgatgtgtgccacattttatctttccctttaccttggaaaggtggtagctgtgcacaatgtatgtggaggagtcagaagacaacagtgcttcattttcatggtttaacccagtgcttcatgatgactttcatttctgcaactaactgaaaatcttgaattaaggttaacaatttggaggccaccaagaaaattgtttaatttttattttttttcaggagcagaaattacgatttcatagagcttattcttcctgagtaaacagccaggaaaacttcctgaataatatgtgctgttcactgttctttctgtactttgtggcttggctatttcctcatgttaacttaaaaaccaactcacctatgacaacccatggtcttgagtttattgttaaaggagcaggtgtgattaatggccttagtgaaattatggattcctattgttactaggttcttatcgtaagaactaacaaaaccttgtggcattatttggtatatcaatgatgaataagtgctgataatatggattttacttcctgtgctatatttacataaagaaaacaataaacggaatatgtaattcatatttagttagtgcctttctcaaaattaagaattataaattttgtttctctgtacaactacaaaagaagttgggtaatgtacctaaggagtgcaatttgatttcaagtaaaattactgatatatttaagtgaacacagttatacattaaaatttattgttaattcttgtcaaacactaggtattctatagttttcaatacttttgaataaatactctgaaatgatcatactaatattttgcagatatattatctatggctacttatactaatgaaagtgataacttgcatttaaaaaatttagcttccttttctttgacaatttctcagacgtatagattatattgtgattgtatgtgcctctccatctgcctgcagactctccatcacacctcagtcccctttttataacagtttctttttataacagttcactgagtccagttagttcttcgtgtatgcattgggtgttgagccatccactttaccaacattatatttttttgtgtgttctacctcacatttggttaagtattgagccaatacaccattcagtttacagagctactaaaagactggggaaaatagcaaaaaccatgacaaagcaccaacctgcttagcataaaataattgctcaacaatcacaatttaatgatacattaacttgagccttttttgactaacctctgctggtgggatggagtgttctgcatagatatactttaattatactactctttaataaccagttagcaagatgagaaaggatagatacaatatatgagttgttaataatagttttaatgagctcttggaagcaagaaaccctattttcaggaatttataatggagatagtgattagagtgtcagtatctgtgtaaaatattaactatgtgccgcttgtacagatggaagagatagcttcatattacccaaggcttatctaaagccaatctctctctctctctctctctctctctctctctctctctctctctttctatatatatatatatatatatatatatatatatatatatatacacacacacacacacgcatatatatatgcgtgtgtgtgtgtgtgtgtgtgtgtgtgtgtgttgttgttgttgttgttgttgttgttgttagactgaattgtgtgctcacagagactgataatttccttaataatagcttcttccattctgggaaacctgaagctgctcagatcaagaagtctgaagcttccaaatgacaacaacaacaagaacaaaatgatgaaatctccagtctcaagccaaagactaaatagctctcagaaacctattggtatcattctatgcttaaatgctgataaaccctgagtctggtgtaaacatggaaagcaggagaaaatgcatccagttggaacatgaaaggcatgagcagtgaggcactctctcattctacatcagaactctaacctactgggaatttccacccatatacccagccttttatttagatcctttgcagacatgaacacaattgtgatttactaattacctctgtattccttcatatagtcaagctgacaatgaattagacaccataagcccactcttttctacttgactctatgtaggtcttcttaaagcagaaattttctccaaataaacacacgacaaaggccattgttgcattgcatatactacagttatctcacacataagtccaaatgtatgaagaccttttccagaaaaaaagcataaaggtttttaatttttttaaatgttatttttgatacaaatctcacttgtatcatagactcatctcaaagaggtaaagtttttaaaagattcatactcttttcctcatatcccataatattaaaactatgtggcaaatctcgcgatactcatgtattactataaagcaatcctattacatgatgaaagaataggaaagaaaggaaagtaatttgcctaacatatacgtaattatgcacaagtatgttcatagcaatgtaaggaagcaatgttaatctatgaaatatattacatgatcatgcttgaaacttgaagatggcttattctactacccaacccatgctctctttgtcttcaacaagtacctcagcatagctatttacatggcaaactggcccatgcttttattcctgaaaaatctgggaaatctccattcctgagttggagtccattgttcttaatcacattaaaaagtggtactgagtgacatactatggaattttctttattccaaaaatactcttccttgcctgattgtagtgtggtagttaaatatctcctaggtggtttgaataaaggaaccctgaccgttctgtccctctattcttatgatattgactcagaggcaagaagaggaaaatacagttgcaggaaggtgttgtaatttcaaaatacttcaatttctggttcagtgaatttacttttgaatctcctaatggagctattagttctcagtaactaaaatttctaggtcaacagagtataaggttgtaggaagaggaaagaaaactatttttaatgggtcactaggggcagtgggagtggactattctcacttatgctccttggtttctagacataaaaattcaagtttgggaaaatattatattttggaaatggatttagaacatatgtgactttcggggaaactttccagttcttcaagatattgcctgaattgattttgctaaaaatgtgtttttccaaatccattccaccatgttatcaagctgtgttcttatggtatatggtatgttatatggtaatattagcaatcttaatgagcatgaacttacttctgaactttgccagtgaaatgagcagtgaatgttctagtccaagaaataaatatatacattaccatgataacagaaataaatttgtaatcccatggatgtagtatgtgaagaaacattgtgaaaaaaatggcaaattcatatctggaataaatgtctattttaatgactattactccttcaatatatgatggaagtggttaagtggcttattcccatggaaaatggagagtcagtgctggtttctactggtaagaaattggatagtgagacggcctcctcaaccttaaatttcccttcaacttagattttgatacaacagaatttgccagttattatttctagagctataagatttaatagataagtcctttttgtgcctaatttgtgcttttatttttattttgtgcttttaaagttccagctctcaaaggaatttgggttcatttttttgtaaggtgtgaggaagtattgaagactcagccttcttgagaatattcagtttttttgacctttctttgtctttgtaacatactataatcaccaacataattccatttgcattgttgtaatataattatgtatttgcatccattacccagatgagaatcttcaaggtttttttttctttaatatctacaagcatacttatttcatgtatgctcactaaacagtgaaagaaaatagatgaatgaatcattgagttgatgaagagatttctgtgatacaaatgtaattattctggtgtaatcacaaggtttacatatgagtaatttgtgaattaagaacatatttatcacacaggataaaatctagttagtaggtttgtcagtataatacttatgatttacttaatatttatttatttctgaaactcagaagtagatgtttcttttcttatctctatattttcataattgtaagtatacaacccagactctggaataaatgctggcaccattaggatgctgtgcattttgcagttcttaattaattgtggcaaacacatagcagtctctatggccagcatcatctgcatacagcggcataatcatttttctttatagtagagattgttttatgagtcttaagtcttcccttgggggtgtggttatcatctgataatcacacccctgggagattcaaaacacttatcttaggatcatgacttgcagtgccccagaggtgtgattatctcaggaaattcacactctctgtcatgcctaattgcttaattattatagctgtgagttcagagcaccatataggaagtaaagtagtgtcagcatttccaaagaactccttatccaagagtctataacttagctatttaagacggagtccatgttatatcgaatcacaacactacagatattagtctaagaaatatggttaagtatttttattttaaaattgagtaagaattcttttagtgaattgataaaagataaaatgtcaatttaatgtctttaaaagttatattctgggatgatgagatacatcagtgggttaaaggtgcttgctaccaaatctaaggacctaagttagatcccagaatctacataagggaaagagataatcaacttctgaaaattgtcatccaactgctggatgcatgtgtggcttatgcatgtccacacacatgacacctactcacagtcacattcacacacaggcatacaataaataaattaatttcaagaaaacaacatactgtgaggcagataaagaaataaaagtattctaaagataaaataattgaacagtttaaacagcaacagtgctccatataatttataatttccttggaaatgcacttaaatattttagatcactcataaagggttatgtaaataaaataaactaagctataattggacaacactgtcatatatgcatcagctctgaacctcaatcaaatattttctaagttcataaactgttaactttctaaggaagatcaagccattgagtagaatgtaggaagccaggaggcaaagttaaaccactgttggtataccttctagcagtgttctttatttctcagtcaagttttagagatgacaggtattttaaacctggaaaattgtgcctcatgcacttcaattcataggttagtaaaaattaaactacgtcaccaatgtggcaattcctaagagatatattcggtttgcaatctgtaaatcatctgagttaatgcttttccgataacagcatccctgagaagctcacaaaatttatccctatgtagatatgagcttgaattgaacagaaagaatgttgattgccatgtaatgcattgtgtactaaagctaaaactggcactgttcccagatcagtgggtaatttttttagttactaaaactattagaatctttccctgtatcatttttatcttttcactctgccttgggcgaggatgtctggatgtctaaatgttgacatttgaaaaacttatgttttagagttatatctcacaaataatgtaaaaatcactacaaagttcttaatcatttcttcatttctttttttgcattaaatttacagcagttttcttgcctaagactactattacagtgtgtaaggccagaaatgctaatgaaagctatgaatttatttatttttatttatatttactttttactacataccaatggcattaacccggacctgcctgaccctcaacccatttccacatccactcctcagaaagggtaaggcctcccttgaagagtcagcaaagcctggcacagtaagttgaggcatgaccaagtcccatgctctctgcatggaagctgagcaaggaatttcaccacagggaatgggctccaaatatagctaataagtgttgatagctaaaataataaatatataaatatttgctacagcataacaatggaaaatatctaacaatctgattattcaaatggaccaaagttttgattgaagatttatgaaaagaaggaacacagatggccaataaacacatcaacattattgattcctgtattagtgggaattctttaaaggaacagaactaatagaatttagagatataaaggggatttattacagtggcttacaggctgaggtattactagttcaacaatggtagtcactcaagggaaattccaatgtttgttcagtccatgagcctgggtgtctcagctgttcttcagtttaagcaggaatatggaagaagtaggtcgcagtgccagtgaaggaatgggtttactctttattggctgctaccagaagatgtgactcaaattgaacatggaccttgccacattaaaggtggctcttcctaattcaaatgatttaattaagaaaaatccttcacagttgtccctgccatttggattttagttaattacagatgtattcaatttggcaccaataatagccaccaaaattctcaagaaaaattaagtcaaaactatgatgatatatggcatcacacctattagaatgtctagtgaacaaaagaaagcatataaaaagagtacagagaaaatgtaccttctgtgtatttttgatgaaagcgaaaaatggcatagttcctatagaagccatttgactatttccaaaatactaactacaataaggaagcttatgatttgcatggtgactaagaaataaaataaaagtgaaaataaataaaaatttccatatgacacagtaattctactcttgggtgtgtgcttacaatagtctgattgtggcaccataatatgaattggactgaaatcttaatatccaatgtctcaaaatgtgataacatttatagtggcattaaagttgtggttaagcgtaaatgaagtcattaggttgaacattactctgattgactaatgtccttttaataaggcaacaaaggacacagacacctcagaatttagatcattcaaagagatatggagaagatggacatactgaagtcaagaagagaggtctcaggagaaagcaagccttacagcacctttaacttggacttctatcttttttaatggttcagaaaatgaatgtctattgccccagtcaatattctattgtcctgtaaatcgtaccaaatcaacaaaatagtcaaaagatttcaaagcattcttctgaagaagctaaaccatgcttttcagccttcattttgaatttacaaactttcccactgtcaacatttggtacatacagttgcctactttgaggagaactctcatttgctaggagtacttggtgattttgttcaggacccaggttaagtttcaaggccccacatgatgcctcaaaatgtctgcaattccaattccagggaatctcctactcctttctgacttctgtaggcatcaggtatgcacatggtgcacgtgcatgcatgtagtcaaagcattcatacatataaagtaaagtaaatcaaaataaataatgcaatagtggcaaaaatgatttgggagtaatcaactactttctgatgggatttaaagtctattgtacaggatggaactcaggtttgatatagtgagctaggcacaaaactatggctggctcatagtcccaagaggagaatggacaattattattctgctaaatgggcatagtaactaaattctccccaagtttttatctttataactatacattagtctatctctcaactaccatcagaaaaacctcatttttgtcgtagataacagtttccaaacagtcaatggatagaataagagacattttgagtgttatacctttaatgggacatctataccctcccacacccaaatgctcaggaataatcacagaagaggggataagaagattgtaagaaccaaaagtaatggatgtcttagcaaagcagcattttctggtgatgactcaccttaaccacatagctcacagcagctgtgaatgaacccatgagacctgcataaatcaaggccatcaaaatcctaatttgaatggaatgggagtgatggggtcccacccatagctgagtaactactgacaactgaaagttgtttgggaagagagagtaatgtttttcaagtatgtggcccctgagaggttaattgtgctccaagagatggtactacatacatgtacatacaggcaatactaagtatacccagtaggtttcaaataccagagcatatgaagttgaatctcaagcaagcaaaaatgtaaaagcaaacttttcttgttagctaccagtctatgatattttgcataccaattgattttcttctgatgtgagcattcaaaaaattaaaattaaatgaaaatagaaaagtacaatttttctcttaccatttctacttcaaaatcacatttgtggttttctaatgtagaattaaggatggcaattagtaattcattgctacttattttatatgatctttgtttaaaatggcatttaaggcatggttcctgctatttcaaatttagaaatataaaaactggttaaacatcagttccaagatgcttgtcatacagatgaatgcattggtacaagggaatttccatgttatgacatcagttatgtattttgtcaatcatgagaatagaaaatgtcactgtcagaaaaaatggtgaaagaatacgtaagaaaatataatgtagagagtgtgtcgggaggagctgggcagtaccagagatgcagcctgcatattacacttccctacactatcctgctctgtgaactctgttgccttaaaactgtgtttactcccttgggaggaatgtctctgcctgcccacggaatgccatgagcaagatgtttcctccccctttctcagcaatgcagttttcaacatttacaggggacctgtgcaaacagcccacaatcagccatgagaccttctgtgtcctgagcacacatggtgaacatgatgagaaatactcagtatgtttatcattgtttcactgtgagctgtctggaataaaaacagcacaaaaacgccatgagaggcgttctggagcatcatggcccagagtgccctgattctgttgaataccaaattcaacttcaattccttgccactggtaggttgcaatccagagaaaccatgttgtttaccaccagcaaactgaattctccttcttgtgccatccactcttaaaccaatgtgattttattaagaccacacacaagctgatctgtgacttcaaaaatcccagagatgatgacagtaacttcctagtttgcattctaatccctctgactattattatctttcactggcacctaaacccaccactctgccattatcctgtctctctctctctctgctgtcttccactgcagtaagtgacagcttatctttgtggacatcaggggatgtgcctatctatcttgcttgacagagacaaaaaaaaggccaaatcaaaaatgaaaaaaaaatcttcacacttcattactttaaacttaacctcacacttagattttaatggccaaatagccagtaccgtttcaaagctttcctttgattccattttgatttttatatctatcttgaagatcattaactactatgaattacaatggggaagtacattagaagattgtggtttctgaattcaacatctaggacaaaacttataaataaacaaaatagagaaactatattaaattcctcattaaaaataaatgtacagttttatgtaaacatattaactttaaataaggcagtttacctgcaagatggcttatggaaaaagatactggctgccaagaactcactgacaaaaaagatactgacaataggaactaaatatccaaacagggagggggctatgtgaatcctgaacatgcacaacatgacttcatgcatgatcacacagatagaggcacacatactaatgcaaataaagtttgaaaaatttataacatcattgtaaaccaaatatataataggcttataaatattacattcaacttaatgcattagtgtgttgttatttgccattcatttttcacgagcttcaatatgtacatccttgttacccaaacttcccaagtgatagaaccatactttaatatcaataaactataataatatgtcaataagtttcaacatgctttgtcctgcttaactacataccatagtctaagaaatttgtttatccacgttgtctacatacagaataatttgaattatgtgttaaaagcttatgctgaggaagtatggggaaaaaaactacagaatacaagacaattctgggtagctcagcatctattatgaactgaacagaaagttagctttttgagagctttagatatgcattttgtttatttttgtgtgtgtgagcacatgtgcaccatgacatgcatggagggcagagacaacttacatgagtaggcctacttcttctacaacttgtatcataggcatgtaacttaggtttccacacttggcagcaagtggctgcatctgctgagccacctctacaagccaagacctacatttcgaatcacgtgaacactggggatactttaagtacaaaatcattgcctaagtgggagcacaagctttttctaacaccaaagatacaaggacattttataatattgaaaaaattacacattgtaattgaataacatcttgtgatcaatttgaatatagtttggaatgaaatttttaccatttgggatacttaaagaaatttcctggtgaaatcacttaaactttctggaataatgtaatttcagaatttgcatgaagttcagttggtatggtgtagacatggggttattcaacacattttcaaaaattagataaatacattcatataaatttgaagcaaaaactcagcaaagtacatattatatcttccaaggttaaaaattttatgatagaactttattttccacaaaataaatattattcattatgaaactgttgttagattcaacattgctggaagagtgtagtgaaaactacatgtgacaacttcttcaccttatttaaatcactttccctttctgagttttctcatttgtaatttttagttacaggaaagagaaatagaaatctgtagtcaatgaggttctggatagtggtggaagtgtgtgtgtgtgtgtgtgtgtgtgagagagagagagagagagagagagagagagagagaggggggagggagggagggagggagggagagagagagagagagagaccctacctgctgtcaattccctgaaatttcagtagttctctattctatggctgagcctcctgctcacctccctgagaatactcttccaatttttgtcatgtcaagggtagaagatgagacaaaccaacaaaataaattcaagtttcctttttgttttcacaattcatcactcctttaataaatacagactgatgtttgcctatgacagtttctcatctccttaactaagaattactctcagcctttccctgctaaaaatataaattcaaggtgtaaaacaggaacataaatagattgcttatattaaaaatataaacctccctagaagtttgctatattcctccttacaaaatgtttttgtttctcatttggaagattctaagcaactgctaccatatattttcacagcaaacttgtcatccactttcattcaagtgagacttccttacacatctatgtaaaatgaattatagaagctcaccaggagcaataaaccaggcttagcatgcatcatgctctactcttacctgagagtcagatggttcaggcagagctctactgatataatgaacatctttgggcccttgtgtcagaaatcggttaccatgttgacaccacataagccctttacaccaactcaatcgtcagtttgaactcacacgttgtaggaatactacctttaggaatatgttcacatgggaagttttatttaatttgtactgcctttaatgtagtttgataggaaagactaacaaaaatgccttaatagtgtgtttactgtaatacacatgaacagaaacataattcaataagagttaaaaagcataagcactaagttgacctaaatgaagctagagaatatttaatcatatttaaggaaaattaggggacaagattttcaaaacacccccttcagtggcagaaattttagtttatgagttaataggttgcttagctttttgcttcttattgccatattttaagtctccttatatatctgcttttgtaaccaaaatgaatggaatgacagtgctgttaataattcatgatgcagtaaaacagcctaaattgtactcagcagggagagatagaaactgtttttattgatgccacattttcatagtaaatataaaataaaatgtatatcaagtagacaagattttttttttttgcttcaagcattgcacacagactcagactctgtgtggacacataaaactacattttatgtttgcctcacaaaaaattacacacatcacccatttactggagaatgagtgcttgagcttaagtaattgctgcttgcttgtgtttgtgtgctagcatggccacaggggggcttatttactccttgccctcaagtaaaactccctgtgtataagttattggcattgcaacttaatcattaactttgtcacattttccccaagaccaataggaagacaattaaggaagctactgatttcatggaaacagcctgcggttttaaacgtcactaccctatttcacttcttgtgccaaagactggacactcataagtgaaacaaattctttgttttgtttttcgagacagggtttctctgtggctttggaggctgtcctggaactagctgttgtagaccaggctagtctccaactcacagagatccgcctgcctctgcctcccaagtgctgagattaaacatgtgcaccaccactgctcaccgtgcaatgaattattatccctcagccagagtgtttgctattattttccccttcaggtactgctataccccccacttacttctgagttctaatgaaatgtatgctgtttagatttggagatggggcctttgagaaggaaattaagaatgagactgaagaatgactccctatgtcatataactgatgtctttgtattaaagagaaagcaatggagccatgactttgttctcacttatacagaggatagattttatgataattaagcaggaagaacactgtgtatgccaagaagataggattcatctgcctacataagctaacatacatacccccagatcacgcacctccttgataatggacttcttcatgtgggactcacgtgagttcactattgaacttgcagggataggaagcaattcactcatttagaaagaagctatgtaaaattttgccccagattctttacttaaaatagttcccagtagagaacattttctttctaattattcttctcactccagctgcctaaaattcttttttcccccttgctatcattccatgaattattctatgtctggtcttaatataaaatttcttgagacaataggctatatagttatctctagggataactctgtctccatagatatacctagattttaatggagactgaataatacaaagtaaaatattagtaggctgaaaataactgacctaaagaatgctttcatggcaatcatacaaatgtatgaaatttatgactaacataggttctatttgacctaattgacaccttactttaattatgcttctttttctatttcataacaagcatgaatttttttgtaatgataataggacaactctttgcttataacagatctgtatcttttatgtaaattacattttggcttcctcttatctatataatatttactaaaagaagttgaaattatttccaatcaatctagaatctgagaagtttctgataattgtctagtacatatattgaatatctccttacatcatcttttgaatagctatgtacctgtgtgttcactctgtaatgtatctccgttatccatatgaactatatttattcagccagttggctttgtggttggtcttatgaattgttttcactttgaataatgagcaaatggatgtagtatccattcttttcagtagttttagcagtcagggcacatatctgttggtttcttcgtagatttttcattatgtgtgtacatatgtatatgaatatatgcacttgtgtttatgagaacatactcttttttgatttttgagacagggcttctctgtgtagctttgaagcctatcctggcactcactctggagaccaggctggccttggactcacagagatccgcctgcctctgcctcccgagtgctggaattaaaggcgtgcgccaccaacgcccgactgagaacatactcttgtgatatatggaggacaaaagagggtgtcttatctttctgaagtgaattacaggcatttgagagactaatcaagtgcatgctggattctaaacttcagtctttatgattactcaacactctctttttatcctgagtagtctagaaaaaaaaattgaatcttatacacagcccaaagtaaatatcataggtaatcaacttaaagataaaaatattgttatatgttcatatcatagatactttgtgtacaataatggaaccaacgtttactatagaactagaagataactgacattctacaggcatgcaaacttggattgtactcttcagtttttctctggctataatatttaaaaaatgaaataattttagatatgccattttaaatctatcctatagttttctaagtagttacagtagctgtattcaaactctgaacattatttataaaacaagtgagtgaaggctatggaagacagaaagatgaagacagcctgtccaggtatgttgagaaatgaaaaacaatggtagataattggttaggttttcttttggtttcatatatctcagattagaaatttaagaatctggcaacatcgacataccaatgaaaacagaggaaagcctgttttctctaacaaaagaaacaaaaaagggattatcttggagaataaaacatttttagagaatagccactgtattattgctaaatactatggtagtagtggagaaattgtctccttattgaccttaaccaactatattggagtattaccgttgtatcctgcaagcctttggtgaagcaatcaatatttacatctgttctctccagaatatattcagcatggtcacttacttgttcctctctcttcaaaggaagcccagagaagaatcacaatatttaccatagtctagctctaatatggctattgccatgtccataccagtagataccatatgaagacctgaaactcctatccgtccagcaataaggagaaaatttcaccaccacaaagtacctgcgagactgaatgagaaacctattagtattaagtcaacattgttccccatttttactctctgccatcaatgtcagaaagaagaggtaatgtaagatcctgcttcataactatatgaatatccaaatatcttggcttcaataagaaatccctcaatattctaagaatgagtatgaacgagtatgagggaaaactaaaaacatgattatgtaaaagcataatcaactgacgccaacatagagatggcaaagaagttagaaacattggagacaaatgcaagcatactatactaaatgtgcctcattgagcaactataaatgtgctcagaaatgtgtgtcaaaagaaaatataattactgaaatgaaaagcccagaggctgggctcattagcacaaaatgatgggcaagagaaagaaggtaaagtgtaaaacaggaggatggtagaaatgatgaactttgagcaagagggaaaaaataagatttcaaaaatgaaaacatagaaacccatgaaatgaaaataggattcaaaacactagagtcttatagggagaggagaaagtgagtctggctaaaaaggaatgcatacaaatgtcatctgaattttcccatacttggtaacagacatacacttttgaaatcatagtaacacaaaaagaacagatccaaagaaccatttgttgagaagactaaaactaatctccaaaatgaaaggaatcattgaaaaattacccattacctagttgttgatgaaaaaaaaatgaatcatgtaagtctttctgggagaaagtatggagtcagaagaagcacatctaaatggaagggaaatatagaagatgaaacctctgatcacaaggaattaaaaaaacctattatggctgtcaacaatatgagtaacaacaattaaaggacaagaagccatgaatttgagagacaagagggtgtgaattgatgtaattataatttcaagaaataaaaattaatatgaagtatataagtacaattggctctcactatttcaacttttctagatgtttcacatttgaagcaacagctgtaacaacatcatttcttttgtgtttattagaagtaactaaaagataatacataggaaattaaaggaaagtaatatttcccgtaattcacacaaactgatcaaataaagccagcatactatgacaaattatgcagataataatgtcctaatcagacaataaaataggtaaaataaaaatgctaaggatggagagatagctcagctcttaagaatatttgctcgtctttcaaagggcaagggttggatttccaacacccatttcaggtgacttatgatcatttgtaactccaaccccaggggatctgatattctcttgtggaccctgaaggaatctatatacacatacacagaaatagtatactactactactactactactactactactactactactactactactaaaccactacagatagatgagcctatgattaataaaaatgttcaagtgagaactctcaatgaaaagaaagcacaaaatagaacaaaacttaaattttgttaccagattgagtttaattttattagtaactaagttactgtaagtgatcatttaaagaattagaatgaatttaataaaattaaaaatattacccacatgagtaatttatgtgaattcaaatgcatctgtataagctagcagaggatacaatcatgggaaaagatatttcatgaaaacccttatcaaagtaaatcagaagtacatatattagtatcagataagatacatttaagagggaagaagtgaccagagagttacatcctataatgttataaatgacaaaatatcctaccaaaaagactgagcaattttaacagtgtgtgaatcaaactacagagacataaaacatattcaaacaacacccaagagcactaacaagaaaatctaagctataactattgtttaaatgaactcaacattcctttatcaactgcaattagaaaaaacaacagtaattcaaaccttaataacagcacgaatcaacaaaacctagcagatgtttatgcaatattccaaatatatgccattcaaatatacatagcataaatagaccatatattggcccattatgaaaatcccaacaacttttacatttgtatgtatggatgtatacaggttatttgtgtagtacatgtggatagcttcatgcatatgcatgtgtgtagtctagtggccaatgtatacacacttacctaatcactttccaccatatttcttgagaaagtctttcactgattttaggcttcaccactttggttagaatggctatcaccaagccttgataatcctattatgtctgtctccccaaagccgatattgcaggattatacctacatgtctgggtttttatttgggttgtgggaatcttaactcaggtttcactttactgagttaactatctcctcagctcccgaaaagtttagagtcacctctttgaccataatggaattaaactgaaaatcagtaacagaaaaatgaaagaaaaatataaagccctagtaaatcagacagcatagtttctaataattcattattcaaaacaaagaaatcttaaaaaataaaacaatacatcaaacacaatgagagaataaacatcaaaatttgtgatccagaataattcatcatccattcaccagtcagtaaactaattggttgattccattttctagctacactgaatagaatagcagtaaccatgattctcagagaatggctgaaaattacattagtcaagtccttataaagtgatacacaaggatgggatgtagatctggactttcaagtcacagaaaaggatataaagtaattgttttctagtttagtgctctatgaatttatctttcttttttgatggtaggtagtataaaatatttgataatgagatccaaaatgaatttccatggcttcagaatagctatggtaactgtacagaagttcagtgagatgtatagactgggtcaggctaatttcactgtgtgaatttttcatttgcaagttgtttacaataaagctttttagtaactttttaaaatctccaataaattgactagcaattgtaagcagagaagaaggagagagagagagagagagagagagagagagagagagagagagagagagagagagagagagggagagaggagggaaggagggagagtgggagggagggagggagggagggagaaagaaagaaagaaagaaagaaatagaatctgaaataaagtgggttcttccactgtcctgcagacttcaaaaggatagtaaggacatactacaaacatttagttgcaaaatgtgacaacttatacaaaatggcacaattcctcaaaaagcacagattacaacaacttcaaataaagcaaatttaatatacccataactactgaggaaattgaatttgtaatttgaaaactcccagaatagtaatttcaaggcccagatggtttcacttggaaaattctacaaaacatttatggaagaattaaaagcatttctacacaatttcttccagaaatcaagagaggatatctccctgttcattttatgaagatagactgatactaaaccaaggagacgaccaatgcaaaaatactgtcaatgaagaacactagcagagaccaaaagctctcacacatgcagggacttagacataaatttttacccaatcactagtaaatagatttaggtaatataaagatattatacatcttgaccaagtctcacttattcctgtgatttttcagtatttaaaaatcaatcaatgtaacatactgtactaacaggtaaaagaagaaaaacaacaaacaattctactactaaatctagggaaaaaatttttaaatttcagtacttaagagtatataactcagaaatgaaaaacaggagcaggggtacctcggatggtttacacaataaaagcatagaaattaatatactgaatgctaaaactcagggttttttctataacaacacagggactgatactcctgaatacataagtaagccatgaatataaataaaagacttaaaaacaaaaatgacaagaaataagtttgaccttaatcttgagtgtcataattatataatagaaatccacagaaaactgacatatactttctattgaaggttttattatcaccccctctgtagtgttccagggaattataaaatgttgatactaaagtataagcagaagccatggcacttcttcgttgtaattgatttttgactattgttttatcagcgtagtcaaaggggatcaaatatacagtgttgtaagaccttgacattataagcagaaattgttttgacctttcactcttgctgttagtgacaatgcagtgggggaagtataggtgtgttctctggcttaaggaaacaaagtgtgatcctgtatagagtgtgtatggttggggtaaagggaaactaggaaacttgaccagcatgtttcagaatcaatttgatgaaagtaataaggacaggaggtaatgtttgcagtctgaatgaacctcaaattttaaccctgttgcatacttgattctggtaaaaataatgggtttacatgcagaaaaattcaagagatgttgaaatggaaaccaagtgagatagtgctttttttttttttacaaagaattttcttattatataggtttgaacacagcctgggttattcttccttgtttctgtcaagtgaaggcataatattctctaaaagttattatgtttatgttagaacatatttaatgtaatttaaaatgacatcttgttatttatggatccttagcatcttaaaaagtcctttttagtgatgtggattgtaggctgtaatcctttgctttatgtctaaaattcatatatgagtgagcacataccatctttgtctttttgtgactgggttacttcactcaggatagtttcttctagttccatccatttgcctgcaaatttcaagattccattgatttttccactgagtagtatactccattgtgtaattgtaacacattttctccatccattcttcagttgagggtcatctaggttgcttcaggttttggtctattacaaactacgctactatgaaaatagttgaacttgttgtatgaatgtgcattctttgggtatatgcccaagagaagaattgctggatcttgaggtagactgatttctattttcctcagaaactgccatactgatttccaaactggctgtacaaggttgtattcccaccagcaatggaggagtggtcccttttctccacatcctctccaacacagactgtcattggtatttttgatttttgccattttaactggtgtaagatggtatctcagagttgttttgagttgcatttccctgatggctaaggatgtagaacactttcttaagtgtctttcagccattttagattcctctgttgagaattttctatttagttctgcaccccactttttaatttcattgtttggtggcttgcttcttgagttcattctatattttggataccagccctctgccagatgtggggttggtgaagattttttccagttctgtgggctgctgatttgtcttgttggctgactgtctcctttgccttacagaagcttctcagtttcaaaaggtcccatttattaagtgtgcatctctatgtctgtgctattggtgttatggtcaggaagtagtctcctgtatcaatttgttcaagggtacctcccagtttctcttctaggatgttcagtgtagatggatttatgttgaagtctttgagcctttttggacttaagttttgtgcatgacaatagatatgcatctttctgcaattttctacatgtccaaatccagttatgccagcaccatttgttggagatattttctttttttccattgtataaatttagcttctttgtcaaaaaccaggtgtccatagatatgtgggttagtatcagggtttttaatttgattccattggtcaacctgtctatttttgtgccaataccaagctattttcaggactatggctctataatagagcttgaagtcaggcatggtgatgcctccataagtttgttattgtacagggttgttttgcctttcctaggtttttatgtttttccgtataaagttgagcattgtgctttcaaggtctgtgcagaactgtgttgtgattttgatggggtttgtgttgaatctgtagattgcttttggcaagattgccatttttactatgttgatcttacccatccaagagcatgggagttctttccattttcaggtatctactttagtttctttctttaaagacacaaagttcttactgtacaggtctttcacttgtttggttagtgttaccctaagatattttatggttttttgtggctattttaaagggtgatgtttctctgatttctttctcattgcatttatcatctatatataatagggctactgattttttgagttgattttgtatcctggacaccaagagaagaatgattgctttctcaggagaaggggaaggggataggatctcctgagctaattgggagcatgagggtaggggagaagtagctgggagaaagattgggggagaataggaggggagaggaggaaatggaggaataggaaagttgaatcggggatgaatagaggagagcatgatgagagataccataattgagggagccaatatagattcaaggagagatctggcactagggagatttgtagagatctacaagaatgacaccaagtagcaatctatgcaatagtgacaggctaccctaaatgcccttcccctctaatgaaactgatgactaccttatatgccaccctagagccttcattcagtggctgatggaagcagagacagatacccacagctaaacattgaactgaactctggggcccatttgcagaaagggaggagtgatgagcaaagagatcagtacagggcttgtgaaacctacagaaacagctgacctgaacaagggggagtacagagaccccagagtgatgtctgggaggccagcatgggactgatccagacccataaacatagaagtcagcgaggaggcctcagcactctatggggcctctggcagtagatcagtatttacctctggagtaagaaagaactttgggagctgtcccatgtggagggatgctccctcatcctagacacatgggagagggtctaggccctgcctgggatgatatgacagacagactttggggattctccattgaggaccttatctccctggggagcagatgggagatggggtgggggacaggtggggggttggaggaggaggggggagagggacaggaattgacacgtaaagcaggcttgtttcttatttgaactattaaatataatttcttggaaaaaagtcatctttattaacaaaatgctttggatcttacacacatgtatgtctgtatgtgtttttcaggtaagttttgtttatttgagtattcatttgtttttctaaagagagagaagaagaaatggtgaggtgtggatggttgggaaagtgtgaagaatctgagaggatttagggtagggaaaatagtgaccagaatatagtgtacggattttttttcaataaagaattaaaagtacctcttagaaaactcctgttactatgaatgcaacattgtttttaagttttaaagaaatcttaaaagaaatgtcaatttgaaaattaaatttatgatagctcttccaaataatgtttttatccatgagcaaatatgatagatttgatcataatccttgcaatacacatttagcaattgttgatttattaatgcttattaacatttacatatagtgttaatgcaatcattagtcaagttcttacaaaggcaaaacttaaaagactctggattttctgcctttgtccaagcaggaacacgcctgcatcatgacatacttcttgcctacataccttgttacctatgtgtgaccaagctcatcctgtgtttatgaaaacacgtggcttgtttttctacctgaacagccccagcattccaataagttatctgtccttagacaagtggggcttgcaggttagaggcttttttgttttatagatttcttaagcacagttacctaaaaaattaaaacataactttggcccttacaatagtttcacaaagattcaaaagatcttaacagtatgcacaattttccatttaaagtagaggaaacaaagaaaatacttagcatacagaacgagacatcaagctttacttaacatgtacacacatgtgaattgttttgagatgttgtcctttccatctacctgagaactcagtttccatgagtgagtgggacataggatattgtctttttattttcttcaatgacttttttcatcgacacacaaagagtacagttgaagggaagaaatatttatcctcataaatagaggtgaagttcaacaaaacaaatataaaaatgtaatttgaagtaaccaggtctttgcaacacacatccagaccatgggaaaacccatttactgggacaatttattcttttagattttcacacatagaactctgtgaacaaaataaggaatacataagatgtgagaattatattttcttagtagattctgtttttaagaaactgtcatggtggcttttatctgtaatcttggcacttttttggctgaatcaggatgacatctgtgagtagcctcacctatacactgagtgagatacaggtctaagtcacaaagtgggaacctatctcaaaggggaaagaaagaagaaagaaaatgaaaattggtgaactagtaaactaatgatagcattactttgtacaacatgcatatgaacctaccagatttatctttaggtactgaatggtgactgtcagaacatggtgcatgaatgatctttgggaaaagatttctgatagctccaaaaaaaaaaaaattccaagtaaacaagacatgagtcttttattttatttttctagccatgggctattcctggagtgtacatccatgaccctctcaggtatagtaaatatgagtgtgtttattttacgtcacccagcatcttatcccctgttactcagaatgatgtttccaagcacaggttgttctcgaaactgtgtagagtctccattcatgtgaccttgcccttgtgactgtatactgctggatctcaagtgaactttgctcacatgacttgcttaacccccagaatgccctcagaatgtaaactgtctgatgccctgagcaaaattggcttttgcataagactttagtctgcctcatttttaggctccactcttacaggttcatgtggcaaaatcgctttaaaggtaatcatttaagaaaaagaaagtatttcctattcactgctattgtatttttaccatcatttcatagagtaggcaggtaactaaagcaattatggttatataaagttctgaaaagtataaaattatcaaaattaggaattatcagaaataactagattaggataatcagtccattatgtcttgtttagatcataaatcaaactaaccgacactcaaactgaatttaaaaatgctttactttcttattttctgattaacagttgtagaatttgattttattttaagtattactttaaagatacaatctttatcatcagatgtttatgtgtttaaacaattgaaattacttttacatcctcgttgaaatttgttatttaattgttttatttagcttcacaataatctgaactaaaacaaactcaaccaccaggctagccctgccttgtctttagaactgtaaatgtttgcatctgctacccttaaaggcttaattggtgcttaaactacacaaagaatcaacatgatgtcatgtctagacaacatgtaaattaatatgagagcccatgatttacaaactctatactaatacaaattaatctgaattaagcttaatctctagttattaagtgattaagagtcctgttggtgactatagatcggtgatttccatctgtgattttgtgtgaagacagacacagcctcaaataccaaatgcaatgaggctctatgtctgttcctggtattgaggaactagagaagcaaaactgaaatatacaatctaaaaacatgtaggaagctctccttaagtgtcataattaacttttggcaaaggggttgcttcaggcatgttgactctggctgtgactggcacaccatctctcttagaaagtgtgttcatctgttcagagggagaacttgttcttgctttgagcaaacatgaaatcaaaattgccaatatgttctttcttttttagcagaattattacagtttaatatggacagcaagacacactattattggacactaaaccttgtgaaaacttcctggacttttggctaacaatactcttgtttcttcagacaaaatcaacaggtagctgctctctgaccagaactgttcatgattccatcgttttgcaagtattgggagtatgtggaaaatattgtatctgtctcttttccaaacatggttttgtgtttaaatattgtgtgaaaatttgagtgtaaatatttaaatgctgggtatctagttttgtttctttagtaatatttttgttttgctttgtttgatttttttgttttcttaaatattttcttctggaggaaagcttcttgtaaacttagcttgcaccacattatagttctaaaaaatcttagcaaggaaatctgcagaatagaacatgaaggctggttgcacttctgctagccaggtttcataactgtgctcatatatttctgataattagaaacaaaaagcaattgtaacacattttaaaatagtttattctttttgatatgatagtcatattaaatttagttcaaaagaaaactctatagcttatgttggagaattattcagagtgttttgttggcataatatacataagtttgataattaaaaagctccaatgttatatgaattgagggccactgtatttatatagaatctttcagagacatcctgctcattgtcataataaccgaggctgtcatgtccatgggttgtgcctcacatgaagccctaaacaattctgacaggcggcagctcattaagggacagtcattttgttgaaatgtctatcagctcgcagggatccaccaagatgaataggccgaaaacaataggcccatttgttagagctgtagcttctctactacatgatgagacaatcaagccaagctgccttcaccacaaagacataattaatcaaatggacaaatggctcaaaaattgctctagtatattctgtagtggacagaggtttccatggaaacattggcgtttgcatcacagttaatgaccattctgtacaatgaagtcccctctgcctactcactcctgtactcccccagcactctacctcttctccgcacttttgcaaccattaaaaatacaacctggaaaaaaaaaacaaacaaaacagggagagtgagaaaatagaaagaagaaccttgagcttctgttttctctacccgaaaacataaacccacgattctaagtgtgctatttcagtacttatgaaactaattgcacttttttcttttggtttcaaaaattaaaaaatacatatgtggaaaaccagtctaaaattatgattattaatgctcttcaaaaatacagtgacttaactaggagattttaaaatacagcttagattattacagtgatttgaaatatgtttgaaataattaaattgtaatgtacaaatattaattgaaaattcagtaaagtcttgcagcaaggaaagctttaagcttcattttctggtgcaggatatgtaagtattaatcatgaggactttcgtactttgtgtgcaatatatctttgattaatatttaatcaagttaaaggtaaccctcattttcatacttaaaggaacacactagtgttagcatctctgcttgcaattacattttgttactgggaagaagtgtatgttttaaacattcactctccccttttccttccaaaatagcttatcaacatgttattccttaatcataaacaaagtttgcagaggtgtgctcttaaattccatatgcttattcattctacctgataaaccacaaaagattgcaagtgtgaactctgttttgagattttagggatctgtattgaattttaaaaagcaagtggtctcttacaaaatacatggctgattttcactgaaatacttatttgttttattattttcctttttctctaactgtatttcattgtctctctaaaagaagctgaggggctttgtagaatcccttaatgcttttacctctttttatttatctctttacatttcagagtcatccttgttttgggttttcctgcatgggacatgaagacatgatgcagagagaagcaagaatgagtagaaatggaagataaacacagcatggatactgtggtattttcagacagacagacagacagacagacagacagacagacagacagacacacacacacacacacacacacacacacacacacacacacagagagagagagagagagagagagagaattaaaaagctcctatgtgttataaatcaaggaccactgtatttatataaaatatttcacaaatgaagggtccagattactattttaggaatcacacagagaacctgttataaaatgcacttagagaagtagagaaagttgcataattacagcatcaagttcttcatctatgttccttttccatgcttgtttacaaggagctatgtaaagatgagccaagagcaaagcttccttgaaaaaatgtatggaagttcatgaatcaacattttttgggcaataaatctatattcaattttgtcctactgttctataacctactgagattgaacattatttgcaaattgttttggtttttataaaatgcattttttgcatacttgaatatgtagagtaaattttttcattgtgtcaaggtttagccctacataagatggaatccttgctgttcactactctgagtaaagaaataattagcacctacacagacatagacacagacacagacacagacacacagaaacattaacacacacacacacaaacacacacacacacccttgtgcatatatatgcttaattcagtcatctggtagaggcttaagccatggaaaagtgttttgagcagatattgaaatataactttcatagaaaaaatacattatataaccctaatgcacaacagactagaaactcacaaagtagaacacatatcagcatctacagcttccgaactcacttaattagctattgctttgacaaagtctaccactaaatgtattctaaattctgaagtttaactttacctgttttaaactgtacattctaaattttgtgatgatacttcccaggtatagtctaagttgaagtaactaaatataaaattaaaactaacaatagatacaaaaaaccccacccagattatcagccttggctataaccacctttatatactaagaaacagttgttctgatatttcttcatgttttgaagaatattttagctagggttggaaatgaccatttttatttcaacattttacatattttacagattcttatatcactgttttttgcttaaagaaccatgcctaagaactgttcaataggtcttgctctcactctactccatatgtatgcttcttggcttgtatttaaagaacttgcaacctcaccaaccacgagtgaaagttaccccttcccacatcctcaccagcactggttgttgatatatttcttgatctcagacattactattctggtaagatggtatcttaaagtaattttaatgtatgttttcctaattgctagtaatgtcaaacttttttttaaatgatatttcttggccatttttatttcttcttttgagaaaagtgtttggacccataacctctttttaaaactgactcatttttaaaaattcttggcttctttctgagttgcctgtgcactctgtatattattgttctagcagatgtaggtaggagatattactggccaacctacccaagccgagggtgcccagggcagcccgcatgagcatatgcagcaggcacttcctcctgagccaagcttgcctattatgcctagagactgctgccaaggagacatctgaccagagacaacaatgagaaaaggagaatgcagcagagtcagctgcttgagccaatgggacctttcaggggggtataaaggcaggtctaacttccttaataaatgagtctgtagcatgctctgatactcactgactcccagtacctgagtctttggttctgtcttctcaccctctccagcaaagggtgtctgaacagggtaacccacaacagatgaatagcaggcaaatattttctcttcgaatctgtgtgctttctcctcacttaattgtttcctttgctgtaccccacccccccaaaaaaatccctttttgttttatgaggtcacatttattgttgactttaatttctgagtgcatggagtgttgttcaaaaagccatttcctgaacatatgtcttagaagatactgtctatgtaccttataacagtttcaggctaagatctttaatccatcaagaatacaactgacaattaatgctagtgaaaatgtaagaaaggggaacactcattcagttccgctttctgaaaggtggagaattttcaaaaagctaaaaacagacagcagttgaaccagctacacatctcttggcatatacccagagaactagacatactcctacagagatgcactttcagccatgtttactgtcgttttattcactatacctaagaaatggtaacaaactaaatgtccttcaactgatgaatgaataatggaaaacacaataatattcataatgaaattttttatttataaagaaaaaagtaatagtcgagaggctaccttaaatgcccatctctgataatgagataaatgactaccttatataccatcttagagccttcatccagtagccgatggaagcagaagcagacacccacagctaaacactgagctgaactctggaatccagttgcagagaaggaggcgtgatgagcaaagggatcaagagcaggctggagaaacctagagaaacagctgatctgaaaaaggggttttcatggactccagactgatagatgggaaaccagcataggactgttccagactcctgaatgagaatgtcagtttcgaggtatgggcaatctatgaggtctctggtagtagatcagtatttatttctagcatagtaatggactttgggagtccactccatatagagggatattctctcagcctagatatatggcggagggtctagaccctgctccaaatgctatgacagactttgtggctccccaattgaagtcctcacccttcttggagagcagaaaggggttgtgatagggggatggtaggggacaggggaggagaggatggagaggaaactgggaatgacatgtaaaagaagcttgcttccaatttaaaattggtctaattacaattacaaaaattaaaaagttaaaaaaagaaagaaaaatgaaatcattatgttttctggaaaatggatgaaactggaaaatgttataccacatgaggtaacccagaccataaagataaacactgcatgttctctcttgtttatgaatactagctcctaatctttagatgtgagcataaaatctagacgaaccacaacaaattcaaaaataaaaataagatgaggtggcaagaggaagactaatctctagagagcagagaagtagcaaacaggtatgccaagagggaaaaaacatgtgttaaaatactaaaaattattgtagaattaatagggaaacatcatttacttaaaaatatctctatctatctatctgtctgtctgtctgtctgtctgtctgtatgaatgtgtactaaactatacaagtacatatttatgcatatatgtttaaacacagttttgtcacaaggggtgataatgctcctctcagagccaaagattatttaacaaaaccccaatgccaggcatagacaaagcccctttgatcttttggtcaagggactccaagaaactcccagaacaacatgagttattatctctgcccttgaattcctcccagaacttgagtataagatcttattattgaagacattacacatttaaacacaggacttgagtgaactgtacctgcaagtctccttctttgaggactatttctatacaagtgacaggtttaatgcaagctactgaagagagaaagcaatcaatagtccaatctagctgtaagggaaataaaattataacagtgaccgggattgcaagatatcttcagtagtacctttctggtatatttatgtagggaaaccaacagatgtctaactagccctgaggcccatccaatatgagaaaacaaacactctaaatttaaggcttagggaaaatcatggaagaggaaatggaaagattgtaagaggcagagggctaggaagcctgttgtgagatagagtcttctagacatgacagggatgctgttcccataatttcaacaagacttgtattcttgacaatactagctgacaagacaacacagatgagtgaaatttaactcaatcccacccttgatgaagagtggcaataatggcctcagagaggagaaccaattgaatttgttttctccagtgacaggttatctaaccccagtgttcagaccaaaatacacagtcatttaaaggacaataaatagattgaattagtttctcatgtgtgtgtagctgtaatatttaaaaagccatgagaaggaataatgcagaggcacacagagcaagttagaaatagaagagtaaagggtgagaatagtgtaaatatgtagtcatgtaagcaattcaaacaatgaattttgaatattaaaaaataattctttgtctttggttaagtaggatctgttcacatgtgatgtttcgtgtattttttatatactctaggcatcctttatctgtgttgatattttaatttaattattagcttcacacatgattgctagaattttctggctctattctttattacttctttgtagatgttctagttttatagatattgcaactcggggcatttttccccagttcttagatgttctcttttaatcctgttctctttagtattgttctggattagtctatcctatactatctcatcctaacctaccctaccctaccctgccctaccctatgctgtcctgtcctatatggtcctgaactttcctgtcctatcctagcctatgatattttatcctgacctgacctgctctgtaatgtcctaggctatgctgcttcttttttctctttggattttattttgagaagtttctgtttacttctgttcaagctcactgactccccaaccttgttaaagttaaatctgctgatgaactcatcaaaagtagactttatttttgacactttgtctttcatttctagctttccttttcttattccttctaacagtttctatctctctgttgacattccatctggtcttacatgttggctatattttctatgacagtctttgccatagtaaacacagttcttatttttaatttaaagatgatttcaaagtcttttttaaagcttagtctgattatgatggttactttgcttcttaagatcatctgtattcttttggcttagcttgaaaatgctctaacgagatcttattgcctatattacatagtaactactaataaaataaatatattaaaatctatattaatataacaagttcaggtcattttaatgtttaaatatgggacgcttcatactactgtgttaagtttggtcctacccccatttgactttccttttctttttgtgcatctctttagagagaacctatgtccataatctatgtactacttctgaaagttgtgactgatgtgactgatgtggcagctatacaatggaaggtgtgttctgttctctgaacaggcttcctctattgtaaaggcctgtatctgggggcacctgtgtgatgcttcattgcttcgggctactgtctgtgctccacctctctggtccattctccagctccatagctcttggaaattctttgcttaactccttaccctctttatgtaacatgaaaaggcctttattttaggaaactaggccaacatctggggaaaactttaatccctgatattagctgtttgttaattgtggaagatctaaatgaatttccccaaatcattctattatctattttggtctacttataagtttactcagaaccgctaataaaaaatcattgtttttttttttttttttttttttccagaaaaagcttatggaaatctgacagccatccacaggaacttcttaccctcctaaggtatacacagtttcagtaattttcaatactcacttgctaagtgatccttagctggtggcttctgcaacaattaggcagttctcagatgttaccagatttggaaactgtcttagttaggatttttattgctatgaaaagacaccacagtcaaggcaattctctttttataatttttatttaatttagagacaatcttattttacatatcaatcacagctccctatcccccacatccttccatgccctccactgaccccactcccatatcctacccttcatccactcactagggaggatgagggcttccatgggagagcatgaaagtctgtcacatcatatggaggagggcctaagtatctgggctgagagagtatcccttcatagggaatgggctcccaaattccatttgtgcactagggataaatactggttccactctcagaggtctcataaactacccaggcctcctaactggcacccacattcagagatccctgtgctctcacttgttgaggtcagctgtttctgtgggtttctccagcacattcttggccccttttgctcatttctcctccctctctactactggattccaggagtatggctcagcgcttagctatgtgtggatgcttctgcttttgtcagctgctggatgaaggctctagaatagcatttaagatagtcattaactcattataggggaagggcatttgaggtagcctctccactattgcttcgattcttagttggagtcatccttgtagatctctgaacatttccccagtgccagttttctctttcaacttttaaaaaccaaggcaattcttataaaagaaaacatttaattgaggtggcagctgatagtttcaggggtttagtccattatcctcatggtggggagcatgacagtgtccaggtagacatggtgctggaacaggagcagctgcatgttgatattcaggaaacaggaagtagactcaaacactggaaagtatcttgagcatatatgaaacctcaaagcctacctccacagtggcacacttcctccaacaataccacaactgctccaacaaggccctacctactaataatgacactctcttgggggctatctttcaaatcaccacagggaccacttcttgtattgtgacttcagttacctgataagataaaaaaaatgcactgattttttagcttctctgtttttccttgttgttaagaataaactcaatatcttgaatgtcttctttttgttgaagctgaaacttgaatactcagatttataaataacattttcccatattacattttttcttacattattttttatttatctcatcatttaaactgtttgaatattggccattttgaacttctttaaaaaatggtccccatgttgtttcagcatgcccttctttacctgctaatatagcatctctctattcagtttatttgctaaagtctaatatgcatgcaaggcggtttaagaaaatctgaccaatatacacgtgagataagttgacctagacctcattgtttgtctgtagatcttattaccctaagccttacactattcagtggaaacactattttccactcctccttcagataacaacccctccttactccattgcattgttgtttttttcctgtagagagctagaaagcaagagcaagtgtgagagagccatcttagcctaatggaagaaggccactttcttttcttttgcatgtatcttaaactctgtgtctcttgttcccaacagtcttcatcaattctgagtacaggctttttcaagccctccctcacctaaggttcgaattcctttgcagtcatttagttctcctagcaccagtgaagaaagaaccccattatggtctgtgtttcttcttgtatgagtgttagcagggtgtggaaaacaaacacaaaactgtctcatctgagctttgtgaccctccatggcagctctgatttcctttgagagtttctctaccacaggagtggtactcttcagtgtgccaaaatttggcagacaccgtgtttgtcaaacgtttccttcattttctctcttaagtgcagccttcaccaattttctaagaaaccccagctgaaccccctgcatcatctaattgcatccttcctgggtcagaccctgctcatatgtagtgttctgctgtaggctctagtcttttcttagatcttggaccagatggctgccccgtaacttcaacatgccaatgggctcaagaaaagttgagaacttgctattgtgcacatgcctttttatatcagtgtgaattttgaaacacgtaaatgttttacttattcacacatttgaacaggataaagaaaaaatctaggacaaactggaacctactcaaaactcatgggataagcacagtgtttgaaaggtaaggcagtagtaataggccttcctaaattactaataaatgcaacattgatgattagatacacatgaggtgcaatactaagaattgtcacgacttaacttcaattctaagaacctccatttggttgacaatattgaacagatagagtccatattctgaatgtaagggaagctatgctaggattgtttgcagaagccagtgaagttttatggtgccctgtgcttgcaaactttgaattaagctgcacctctgcatcaaagcttcatttttatttatggcacatgttaacagctttcctacctcagttctattcttagtcatccaacagtataaattgtgatgcttcatttttatgacttcaagacttctttcagtgaacgtatagctattttatttgtgacaaattcgtttccctgataagaatatattcttattgatatacattcaaacacaggtagatacttttattgcaagtcgttcatatgtatgaacatagttgtacatgtgtatttcatatattccagtttgtcatactcttagccactctgaaattgtcatattttatacatgatatccattctatctaagtgtatgtctccttcaataaaacgtatcatgaatgcaaacttgttatagctttttggagtttggtagacccgatagtttttgaagagaggatttaaatgaacaaaactgaacatacagtaagcatctttttacatttactcattggattacttgagaactaaaactggaatgctaatatttgatgctaacttttctacagctttccagacgagaaccaaatgatggacaatcagaaagtctcctgctgtcacccaaggcttagatgaaggcatttgatttgtgataggaaaatcattgtttcttttgtaacatacaggatactgtgaatttactgaatgaaattaataaatgcacagtataggaccagactctgccctttctgtcaaaaaagtctaatcaagtgggtctatcttattggatgcaatgtcttaaatcagacacctctgtgtatttattttatgacttttctttcctcacatgtaactccagtacataaagtatgtgcatgaatacacgtttcaagtacaaaaggaataaatgaaggatgaatgaaaggaactcttaaagtccaacaaacatacattgaacaactaaattgttctagtcttgagtaaaacaaatctccataaatagtatcagttactgctataagacaagatgataaaggcttttcggtgacaaacaaactcgttaggaatttcaatgtttcttcaagcataaaatgcaaagaaattttggctgttttttgagtgagttttactgacatgagagaggcaggtgtggaaaataattctcactgccaggggttttgatttcttctaagttcacacacatacttttttttctgaaaacttatattccattgaataaatacaattttcgatgtgaaaaacctaagactaaaacaaacaaacaaatatcatcaaacagaatggtagagaatgaaatattcacaaagaagttttgctagtaacttggatacatctttctatcataaaaacccttgagacagatagtagaaactggatcagataggggtgtaatgtgctgaattttggctgcagaaatgagagataaaatatttgtcaccatggggatagatccattactgcacttttcaaaatgtcaagggtacatttgaaaagcagtagcaattttctccctttttataaagataattccgtttgtacttcacacatgaaaatctatgtcttaataaaaaactaccttcatggttttaggctaataacgtgagctttacacattttagactgtatgtatgtgtgagtctaaatatctctatttatctatatacatatatatgtatacatctatataaactggtaaatgtataatttcaaggaaccaagatagttttattgatgaattaatatttgtttttgatgaactaactttttaaggtgggtgcagtctgtttagaaatacctccaaaattaggaatgtatttcttaaatctagaatcatagataaatcaaagtatattccaatgtatttatctttgatgtctcagaaaatacttttttggctttgggtgacaaaatataatgaaatgctcccatcagtctgctgacactagggttaatttttcagtgtatttcaggttcccagtaaaatctgataatgtagattctttaagtagagctaagaattgtaacggatcagcaaaaaaagtaactcttagcctacaaactttattttgatacaaaatttaaaagtgttagaagctatcaaaggtaagtatcaaatgaaaatattttatgagttgaaatgatgaagtaaaattctcatgtgagaagtaaacaatttcattgaaattcagctcttggaagttttaatgtatttttgaaggttaatgtagtttttgaaggtggagagactaagagatgtccagttgtaagttcaataactccagtcattaggctagcatttccatcaccatgctaggaatcaaaaataccaactgccaaatttttagacaacttttcataaaatgatttctattatatcatcaaaatattcaattagaactatctaaagaccaaagtgaacaagtactctgtgaatatatatatatatatatatatatatatatataatatataattttattttttatttcaagatacagtttgtctaatgagtgctagctgctcttctatcaaagtataacattagcttaatagcttgaatgataattaaaaatatccttttgtatttaactatatagtgacagaaaatggtaatataatattattaaaatattttatattttagttgatcagtgaattcattaatatttgggtcagttgaaattgttgcaattctcagtgcctcatcaaatatacatcatgtttggttatgattttattcttagtttgcttaatttttttcctttgaaaaatcattctgagattttagtatatgagtactgtatttctgattaattgttatccatgtcgcagtctactagtagcagtctaggggatacctattgtatgaagatccagagatccagcatcttttcatcttgtgttaaagctgaaattatgaaagaggaagaatgaatggcagagtagttaccaaaaaggtcacagtgttgaaagtaagacatgtcacatttcctctctgccaatttccattgtccagagttccctcacaaggctacaatgagccagcctgtgttctcatggaatctataagatgattttacattcaataagataaaatgttttttgataaatgaatcacttttaaatccatacatagtttctctctcagtttgttccatttctcctctttgtcaatagcccattgtttccacatcataatcacctaccccattgtatttcacttgatgtaaattttcttgaataaagaacctatggaacatactgtgctttagatttgcttttgctcaataatcttatagtttttggtggttctacatatcttatcagaatactaaaaccaaaacatattaattacctagtattataaactgaggttgtgagctagcaatttttggattgataaatgaacactcagaagaaaaaacacctaaaaaataaaacagctaagccattaaaaaataaaagacaaatcaaataagctcaattcctccctccccccaaaaaagaagtttctattagacactgagattcgaagacacagctgaatatcactgatctggatcttagaaatgaggtataatttccgtgaagaatcagtaatcactctgttatactctcttgtataatatccaaatttttaagtttagtcaattctattccattttaccttctttcttcttttacaatatttcttagagaatatatctaaccagtacatttgatgaatgttgcataacagaaacatcattgtttctgtcatcttttgatagtcccaaatgtgggaagagaaagaccactgaaccaaattaagtatcaaaattaaattaagtaaagcaagcttttgtattcatgtacatgggctgccaccccctaaggcagagtttggtaggtcagcattggatgtgaggaagacaagatttttatatctcaggggtttaagatttcccaataggggacttgtcaggcaaagtaggagtggttacaggagcagaacataagcatagcaaattagtcataacaaccttctgaaacaaagattgcaaggtggtcataaccacaagtagtcataacaaggtagccataacaacccttttgaaactaaaatagggttgcaacttgattattatcttttcagaaaaaaagacatgattgttcttcctgcaatagtcagtatagaaccagttgtacttaaggctaaaggtggggcatagcccaatcctggaaaacagaggtttaatcataaacataactcaaactagcttgtttttagtataagatggcttttgagaataagatggaggcaaggtgcttcttcattttcttcaaatatataaaatattaattagttaatagtctttatggttgtttttaattttttgaaacaaggtcttattatgatgatatattatttatgatttattaaactagctgatggtcagatacgcaaaacaacctgacattagctcttacctctaactatgctcagaaagggtaatctggttagccaccataaggagactgcaatccctgtctccaccaagcctcagactgcaaccccagactgctgcctcttccttttattatgcctctcaaatcctgggattaaaggcacatgattccaagttctgagatcacctttgtgtaaggtatttctctttaagactggatcaatttcatgtagctcagtgtggccttaaactaacagagatccatctgtttttctctggagttctgggattaaaggcatgttctaccacaacccgactctatggctagctagtatggctgctgggattaaggatgtgtatcaccattgccaggatgtatgacttatggctagctttgctttctgtatgcccaggcatgctctaatagatcataaataatataccaccgcatttcatgtatcccaggatggcctcaacatttctgtatattaaactcttagtcatcttgccccacctgtcaagtactggtattattattctgtaccatcaaactgggttcctataaaagtgatatattttgaaatttgtacttttaatacctaaaatgttgttataacaataaaattatactaatctacttataaatcacactttacaacaataaaactttagtgttgagaaatgttttctatatctttctttctatacataaatgtatattttcacataaaagttagatattcataaattaataaaatccccatgcaaactgagttacaatgaaaatattttaacgcatactgatcagaaaaaaatagaaaaatttcctctagtttcagtgatgaaatattggggaacactcttttctcaatttttgggaagagtagtcatgcaacaacaagtaatacaaagggttatgaatgcataaagtaacttcagctttgttagcctccaaggaaatgcaaatcagaactatttcctatctcttcccagtcacaatggctattataatagcataatgaggaatcggtccctgaggaccctgggatcctgtctctgttgagatcgctgggccattgcggcccccacagtgtgcagagagtacagaggtgagctgattcggcccctaacatgggcccaaattctgcctgctcaccctggcaaaccctgcccagggatcttccacaggaggactcgacccctgaggaccaaacaacccagagtctgctgacatctctgaaccagtgctgctctcacccacctggagagcaagtgcctcagacctgcctgcacccaacttgaaacccatcagagtatcaaagtcaattttacacacctgaagagaacactgcacccatacacacctggaaaggaagtgacaccaactgtacccactggaacaaaagatgggaagacaacaatacaagtacaatccaacaacaggaaaaccattatgacaccaccagagtctagggactctacaacagcaagacatgaacatcccaacacagaagaagcagaagagagcaaccttaaaaacaactttgtggagatgatagagaacctaaaagaggaaatcaaaaaatccttcagagaaatggaggaaaagacaaaccaaaagatgcaagaaataaaggaaagccaaaaaaagccaagaaaatacaattaaacaggtgaaggaaacagttcaggacctgaaaactgaattagagacaataaagaaaacacaaactgagggaatgctggaagtggaaaagcttagtaaacaatcagaaaccacagatgcaagcataaccaatagaatacaagggatggaagacagaatctcagaagctgaagacaaactagaggaaataaactcatcaagcaaagaaaatctgaagtctaacaaatccataacacaaaatattcaggaaatttgggacactgtgtaaagaccaaacctaaggatagtaggtttagaagaaggagaagaaacccaactcaaaggtgcagaaaacacattcaacaaaatcatagaagaaaattttcccaacctaaagaaagacactgccaatgaaagcacaagaagcctacagaatgctaaatagagtggaccacaaaataaagtccccacatcacataataattaaaacaccaaagtacagaataaacaaaaaatattaagagcagcaagggaaaaaggccaagtaacatataaatgcaaacctatcagaattacaccagacttctccatggaaactctgaaagctagaaggacctggatagatattctaccaactctgagagaacatgatgccagcccagactactatacccagcaaagctttcaatcactataattggagaaaacaagatattccacgacaaaaccagatttaaacaacatgtaaccactaatccagccctacagaaagtactggaaggaaaactccaacctaaggaaattaactacacttgcataaacataggcaatagataatcccactctacaaaatcacaaaataaaaggcagggtaaatccacatacaataccagtaccaacaaccaaccaaaaacaaacaagaataaacactgaatggaacttaatttccctcaatattaatggtcttaactcgcctataaaaagacacagggtaacagattggatatgaagacagaatccatgcttctgctgcatacaagaaacacaccttgaattcaaagacagacattacctcagagtaaggggttgggataagatactccaatcaaatgaaccaagaaacgagctggggtagctatccttgtatctaacaagatagacttcaaactaaaatcaatcaaaagagatgaagaaggtcatttcatattaatcacaggaaaaatccatcagaaagaagtctcaattctaaacatctatgccccaaatacaaaggcaccaacttagtaaaagaaacattattaaaactcaaatcataaataaggccctcacacagttatagtgggagacttcaataccccactctcacccctgaacaggaccaccagacagaaacttaacaaagagacaaaggaactaacagaagttatgacccaattgggattaacagacatttatagaactttctatccaaacacaaaagaatataccttcttttcagcatcacatgaaaccttctcaaaaactgaccacattctcggcaacatagcaaacctcaacaggtacaaaaaattggaataatcccctgtgtcttatcagactaccatgctttaaagatagaaatcaaaaacaaatcaaagtgcaaaaaacctaccaactcatggaaattgaacaacatgcatttgcaacattcctgggtcaaggaagaaataaagaaagaaattaaagacttcctagaattcaatgaaaatgttgacacaacatacccaaacttatgggacactttgaaggcagtactaagaggaaagttcatggctctaagtgctcacatgaggaaactagagaatagccacaccagagatctgacatcacagctgaaagctctagaaaaaatggaagcaaattcaccacagaggagcagactccaggaaataatcaaactgagggcagaaatcaataaagttgaaacaaagaaaacaattcaaggaatcaatataacaaagagttggttctttgagaaaatcaacaagatagacaaaccattatccaaattaaccaaaaggcagagagagatcaagcaaattaacaaaatcagaaatgaaaggggggacataacaacagacactgaagaaatccagagaatcttcaggtcgtactttgaatacctgtactccacaaaattggaaaatttaaaggaaatggacaattttctggacagttatcacttaccaaaattgaatcaagaacagataagcaacttaaacagacctataacctctaaggaaatagaagcagtcatcaaaagtctcccaaccaaaaaaaagcccggggccagatggattcactgcagaattctaccagaaatttaaagaagtggtaataccaatactcctcaaattgttccacaaaatagaagcagaagggacattgccaaattctttttacgaggctacaataaccttgatacgcaagccacacaaagacacaactaagaaagagaactacagaccaatatccctcataaacattgatgcaaaaattctcaataaaatcctagcaaatcgaatcacatcagagaaatcatccaccatgatcaagtaggcttcatcccagggatgcaaggatggttcaacatacagaaatctatcaatgtaatccaccatataaacagactgagaaaaaaaaaaaccacatgatcatctcactatatgctgaaaaacctttgacaaaatccaacaccccttcatgataagggtcttggagaaatcagggataacaggaacacacctcaacataataaaagcaacaacaacaacaagccaacagccaacatcaaaataaatggagagaaacttgatccaattcctctaaaatcggggacaagacaaggctgtctgctctctccatacctcttcaatgttgtccttgaagtcctagctagagcaataagacaacaaaaggagatcaagggaatacaaatcagaacggaataagtcaaactctcagtatttccacattagtgacccgaaaaactctaccaggaaactcctgcagctgataaacaccttcagcaaagtggcaggatacaagattaactcaaaaaaatctgtagccctactgtacaccgatgacacactggcggagaaagaaatcagagaaacatcaccctttacaattgccacaaacaacataaaatacctcagggtaacactaaccaaaaatgtgaaagacctgtaccataagaattttgagtctctgaagaaattaaagaagataccatctcccatgctcttggataggtaggatcaacatagtaaaaatggcaatcttgctaaaagcaatctatagattcaatgcaatccccaccaaaatcccaagacaattcttcacagaccttgaaagaacaattctcaactttatatggagaaacaaaagacccaggatagccaaaacatccctatacaataaaggaaattctgaaggcatcaccatccctgacttcaagctctagtacaaagatatagtcctgaaaacatcttggtattggcacaaaaatagactggtagaccaatggaatagaattgaaaaccctgatattaccccacacacctatcaacaaacaatccaaatttatacgatagaacaaagagaacatcttcaacaaattgtgctggcataactggttgcagacatgtagaagactgcagttagacccaagcctatcgccttgcacaaaacttaagtcaaaatggatcaaagatctctacataaatccagctacactgaatctattagaagcaaagtgggaaatactcttgaattaattgatacaggagaccgcttcctgaacattacaccagtagcacaggcacagagatcaacaattgataaatgggacctcctgaaactgagaagtttctgtaaggcaaaggagacagtcagcaagacaaaatggcagcccacagactgggaaatgatattcaccaaccccacatctgacagagggctaatctccaaaatatacaaagaactcaagaagctagtctccaaaacaccaaacaacccaattaaaaagtggggtaaagaactaaacagacaattctcaatagaggaatctaaaatggctgaaagacacataagaaagtgttcaaaatccttagccatcagggaaatgcaaatcaaaacaactctgagataccatcttactcttgtctgaatggccaaaatcaaaaacaccaatgacagttcatgttggagaggatgtggagaaaggggaaaattcctccactgctggtgggagtgccaacttgtacagccactttggaaatcagtatggggactcctcaagaaaatgggaatgagtctaccacaagatccagcaattccactcttaggcatatacccaaatgaagcacattcatacaacaaagacatatgttcaacgatgttcatagcagcactatttgtaaaagccagaaattggaagcagcctagatgcccctcaatgaaaaatggatagagaaaatgtggtacatttacacactggagtactactcagtggaaaaaaacaatggaatcttgaaatttgcaggaaaatggatggatctagaagaaactattgtgagccaggtaacccaatcacaaaaagcaaaaatggtatgtattcactcatatgcagattttagacatagaataaggattaccagcctacaatccacactgccattgaagctaataaacatggaggtccctaagagagacatacatggtccactggagaaggggagaggctcaagatctgagcaaattgggagcacaagaaaaggggggagggaggtaggagaatgagaaggagagaggaagagggatgccatgagggagcagaaaatatgagtcaggggaagaatacacgataacaagaatggagatatcataatagagggagacacttttggtttacagagaaatcggaactagggaaatatctggagatctacaaagatgacaccagctatctcagcaatggaggaaaggctacctcaaatgccctcccctgattatgagattgatgacagacttatatgccctcatccagcagctggtggaagtagaaacagacacacataactaatcaccgatctgaactggcacccagatgcagatagctggaataccagcatgggactgatccagacccaaggaacatcggtttctgtgaggacacctcggaaatctataggacctcctgtagaagcccagtatttatccctagcctagctgtggactttgggagcccagtctatatagaggaatactccctgagccaagacacacagtgggtgggcctaggccctaccccaaaggaaactaagactctgataacaccctatggaaggcctcaccatccagggggagtagagaagatatatgtgacagataaggttttagtgggggggggcgggtaggggatgacgggtgggagaagggaaatgggattgtcatataaaacaatcctgttcctaattcaaattaaaaaaacttgaaaaaaatagcataatgacaaatgttgatgaagaagtgagtggaagttggcctctatatatgtttggaggaatacaaattaatacaacaaataaagaaagcatcatggagatcccttataacactaagaatagaactgttttatgaactcacaatatcacaattgagtatttttccactgaaaaatatcagcatacacaaaggtatttttatatttgtaccactgaagtaagcagatgagtgtaggaagaaaatgtcaaacacacatacacatgtacacatagaaacacacacttgcagtctcatatacataaagcacgatggagtattaataagccataaagaataaaacatgtcacttagagaaaaactaataaaacacaggatataatcattagtgaaacagacagaaaccaggcacagaaaaataagtatttaatgttttctgtctgtagaaaaaaacacaaattcttgaatttttaataaaagcctacattagcataataaattgctacaatgtgctttgtataacaaataaggacttttcataattttcacttattcctaattccttttgtttttgtttttggtgcaaaatttatagtatttcatcacagcaacagggatagaaactaagacattgacacaacttgtaactctccttctttattccaaagctgatgaatgcttgagctgattgttttgactaccacaaaaataacaatagaaacatatatacatatgtatatgaaaatgtctcaatattcactgagagcatacgtttttcttctaagcctagaaggggaaattaatgacatataaccctttagggtagggttaatgactggtttaacgaaatgtagaatcaaattgtaatattccatttatcatttaactttgatataatgtcttgatatcccattctcctgattgtcagtacataaccatggccctgactgacatcctttggtttttaaatcgactcttttcatatgaaaaaattcttgcgggttcttaacatttgatgagtcattgggccaagcccttttaacttcctctctctctctctctctctctctctctctctctctctctctctggtctctatttcatattcctttgactacttttagcacatcttcagccacgttaggaattctgttaatttataattttttaaaaatgtgtacccacttatggttaattatgtttgttttactttgcttttagccatgccaggtgtagaatctcagttcagctctagtgtcagaactaattcattttaatattatagtacccggtggtcacagtgcatgaaatataccagataataaatgctgcttatgcacaattgcaaaagccttttttatggctcagtggttagaatttggcacccatacctcagaattcaagttagatagcaggtgaagtacctggactcctaacttactcaggagactggtgaaggagtattgactcaaattggaggctggtcaagtaggctaaatagcaagaccaaaatgcaaaatcaaataaaaatataaataaataaataatatttaattaaataactattgagccagcaatctaattcattatcttctatatttattgtttaagcacccaggattcccttctgttgattgcatcagaacaaccatttgttttgctttcctttctttctgctgcatacaggacctatgatgttagtgtttttgttttttttttaaagaattagtctgttgattaaatataacatgtgaggaaatgagaaagcttttctattagtacactcattttgctttcacaatgctgcatgcaagaaagtaattctttcatggtacattgcctaggctagactttaggacatcttcactttctttgagatgctgatatttgtttatttagcacattgttactctctactctttttattcaatatattactaaagctttagtgttcattatttacatgttatgaagaatcaacactaattacaaaacatttccacattgaaattctgtttatgtgtggaagggtttagggaaggagggaaaagagagagaggagagagagaaagcagagagaagagagaaagacagagagagagagacagagacagagacagagacagagacagagagacaggagaagagaagagaagagaagagaagagaagagaagagaagagaagagaacagaacagaacagaagagaacagaacagaagagaacagaagagaagagaggtgaatacagagacacacatgccatagcaagcatgacaactttgtggagtcattttctccttccaccttacattgttttcaaacatcagataaaagtcatcaagctgaaggtcatgtaatttgacccagtgagccatatcaaaggcccttaacactgatttttagctgaagcacacaggtttttgttttaggcaataaacatggggagctgaggaagaccttagtgaatgtgaaagagcagatcaagtattgactgaatgtgtattatttgtcatgaacatgcctatgtcaaagaccaaagcctttacctatgggacattggcagagcctttctggtgagggtcaggctcagaactggcaaagtctttctatggtatgagtacaaatgttggcagtgcatgcagaataaacaaataaaaaactaaacaaaacaaaaaacaaaacaacaacaaaccctagcaaccacagtttcctcatcatgcgtacttacagcctgagactatttgcccacgacacctcctgtggaggctagctaacactcccaccagtcacacccccatcatgctgtgtaccttaagttccctgagatacatggtttctgaaatagtcagtgtgaatttaccagagacctaagagttcacttgattatagctttttcatatatgtgtctgtgtgtctgtcccttgttcattccttttcctcccctagtgagaattccaaactgcactgatgccacaccaaatccagtagattctgtgtgacaagttccacagactgaggtgataactcaaaagaaggaggtctcttggaaacagttgtggaactctcagctggagaaaaatattgggttgtgattctcatggcaatttctatttgttcttctattcccttttttcacatcaacgaaatgttgcctatgctgacattttaaacaaaagaaatagataaaaaaaaaaaaaaaccatcccctgagatgagccatgacctcatctcaggaaaaaccagagctttccaaatcattcacgtcattcatataagtacagatagtaaaaactttcccaacaataaaatttcatatggctgttattgaaagtgcacttaagtgtccagtaatgaaagtgtccggtaataagaaagaggtaaaatagttaaaatatcttaataattcaaaaactcacaagaactaggtaacagatattaaacaataactgaccataaatatatattaatttgatttaagaaatatgtgcttagccttggatgatcctatgttagtcatggacagtcttatgctttgactaatcaaggacaaattttatgttttgattaaccctggatgattatgttttggatttctgtgtcactggccaagtaaaaataacgtcatatgattgggtttgtttgacaaaaaacatcccctgagaaaatatccctataaaaaaacttgtttgagaactgcaaaatacactcagattcaaactgcctctgtgtttgtttctgtttgtcaccactgaatccttacccacctattcttcgacgaccctcatcccagggactcccatacctggctggggtgggccgtggcacactggatacagtaatctgtaaatatatgctgtcaagaacaaacccaaacatgatgtggacacttaaagttcttccatgcctgaagaatgacagatataagtaatgaaagaatgagagtatcaaatgaaacaaaaatgatgaactatcaaatgtctcctgatgaatatgcattaagaagattagagaaataaactatttttaaagaaagaaaccttcataaaattatggaattaagttgtattgggaagaagctaagatctttgtgtagttcacaattgttggcaaagaaatactctaacgacaggctccccgagtaatattgtacacattaagaaataacacatctctaactttatttaaaaatatgaaaatttgctgtagtttttgttcagaacataaatttaggagcttagttctatattatattagtaggtaaagtctcactttctctgctgaaggttgttttattgttttggtactattttgataactataatgtctaagattgtgataaaagcacatttatataatctattgtggaaaatggctccattaacacataaagcagattctgaacttcatgttttcaagactcttcacaaataaagtgcctggatttgttttatgtctttttaaattattgctaatggtctctatttgacactcttacaatgttttgtgttaagattcgtatgagattggtatgaaagcacaatgaaaagataagagttcccaaatcaaggactgttatactaagaggacattaatagttttctaagggtttctctgagtaatccaagtactgagttggctgtataagcgctacttaaacttttccacttgtgaccacattttacctgagatatgggtacaaacaagcattttctgtttatatatatatatatatatatatatatatatatatatatatatattatgataactcttacatatgtgtatttacattttattaaggatactttgtctcatattgtagtgtatgtgcttgtttatttctacacaaaaagtaaattttggctgtgtatttaatactacaggacatatagccccttgagtgtctttcagagttaatcgatgttgtggttttaatttaaaaggcctcccatgggcttttgtgtcagaacacataatttctcagttcatggtggtatttgaaaagttgtggaacctttgggaggaggagtcttgctgtaatcattgagtctctggggtcagtcatttatagcttgactctatgccccttctgctctctgattcttgaccacagcagtccataaccatatggctcatactcctgctgccatgttttcactgccataaccgatgactatatacctaaaattgagtcaaagcaaagcatctctctgttgattttctcctgtcatagacacaacaataaactattcttatcatcttgaattcataattgtcaaaaccaaaaagctaattttgtatcaattcctgctacaaaacagcatagtgctaaaataaaaatggtatcctctacagagtacaaagttacaacttttcctttttaattttgttttgtttgagacgggatatctctgtgtagctcaggctagcctagaactctatcttcttgcctcagcctcctaagtgaatggattatagaagagtggcaagaaacctgttttagagatttttatgtggtgttctaggggctggcatttcaacctaacttgttaaaaacaataaacatattcaaatggtcttggttgttcatttcctgtgtgtgtatatacatatatacatgtgtgtgtgtgtgtgtgtgtgtgtgtgtgtgtgtgtttgtgtttgtgtgtgtgtgtgtgtgtgtgtgtgtgtgtgtgtgtgtgtgtgtgtatctgtgaaggcacatgtgtacattcatgtgcatacatttggaggccagacgataacctcaggcacaggattttctttttttagacaagtttcccattggtctggagtttgataagtaatgtccagataccattttactcctgtcagaatggctaaaatcaaaaacaccaacaacagtttatgctggagaggatgtggagaaagggagtcactcctccactgctggtgggagtggcaactcgtacagccactttggaaatcagtatggcagttcctcaggaaaatgggaatcagtctaccacaagattcagtaattacactcttaggcatataccccaaagatgcacattcatatgacaaggacatctgttaaatttttttctataactagtttaatcaattacacaatggaatttcaacaaagtgagacatatttatattcatttatcagtattactttataacactaaagggaacatgagtgttaaacaacaccttataccttacacatatgggtactttgctcttaatggaaacattcagaagcaaacggccaatattaatgtagagctggaagatcactcatttatcactttaaatctttttaaaatttaatgcattaatttatttttacatcccctctgcagtttctcctcacccctctccttacattctctctccctattcccccaatccactcttcctctgtttcagttcagaaagggcctggcttcccatgggtatcaacaaaacagggcatatcaagttatagtaagactaagcacctttactgttattaaggttgaactaagcaaatcagtatgatgaatagattcagaagagccagattaagcattagggatagcccctgctcctatttctaggagacccactagtagaataatttaaacaactgtcacttgtagggagacactgtagccctgcctcctagtagcccctacagttgtgtggggacacacccgtgagggcatggtcagaggaggtctaaggtgactcgggaatagccccttttttctggcccctctctctggcctgggctgccttgctgcccctggcacactctggcttgcatttgggctggtgtttatctgaataaagaaatcttagacttacggactagggatcatctttgagcgcacgtgacattcaataatcatcagtcactatatgtacagggtctaagtccatcacatgcaggctccctagttgtcagttcaaagtttgtgagatcctatgagcccaagttagttgtttcttgggttttcttgtgatgttcttgaacccttttggctccttaaatcaatccttcctccatctcttcagcaggattctcccagctcagcccattgtttggttgtggatctctgatgacaattgtgatagtcaccaatctgatcctagagggggccagttcaggctcagtatctgctgttcctaagagtcttagctgggttcattcttgtagattgccgggagtttcccttgcaccaggtttctacttgatctcaaaatgttccctctttccagtcatctctttcagtactactccccttcatctgccccgttagatcttacacactgtctagtaaatggcacagtaccttggcagggactttaaaaatattcttagattttcagtagttcttaacaggaagagactcctgcagtgttgttttctacacatttctctgcaaatccttcttcttgtgtcctgcctataagctcaatttgacatctcctttggaatccacactttatttttctaatttgatgcatagcgttgcattttactgcaaataccccagagaaataccatgtgtacctagaactgctgagcttttcatccaacttgaattcacaagaaccattcatatttcaaggagaagcagaccctgaagataggagagactgggcatctctagagagagtacctgccttctttctaacttcacacacacacaaatactcttgtcctgtactgtacctacggagcaacgactgtagcttttattacatttccacttttgcaatactgcaggggttgaccaatttgaaatgtacaaaggtagtggagaagctggatatggaagacacagctgaaatttcagattttatggaaattcttctttgagaaaactcagggttttgtctttaaccttcacacaattggatgagatccttgtgctttgtctgtggtacacttgttactaaaatctaactgattctagatatcaggccatccttcaaatacattcaacaacacttggaataacacttgactaaataatatggtaatactgttcaggcaagtggtacatacatcttactgtctttggcagagaattccacaaaaaagtgaacaatgagataccgacgtccattgggatctcctaggagttgttccactaaatattaggatttgtgtcaactttatttactttcaaattatttttcctggataagaaatatggaaatccactgatggacaaccaatctcacttttttttttgccagggttgctgaaaaaatgtagataatgttaggctataccacctctccataaatactaaaatggcggtttcctataggaacacaagagtccaaaatatgcaaatctttatgttagcttgagcattttgtatgaggatgctaaaaataatctgattacttactctcctgtcatagcaagaaaacatttgcatctgtgatgtgatttgggtagagagattatagcttttttatctcattttcaaatttgcattgtcctttaaaacttaaatcataccaattattaaagtagatttttttgtagagtatctgttactgaaggactttttgtaaattcaagcaagaaggatttggctgtgtttgcctcctgtgtatgcactcatctcagaataagaaacttgcaacacagcaccaggtgactaaattcacaccagttgtttcagcaataagccagagatagtgatggaatcttcgattccctggtcttggtccaatgtcagtgccagaactcaaggtcacagcatatcagtgaagttgcaaaatcatagaaagtctttcctgagattaatgttaggactgagtcaaagatgactgaaggggtaccctttggcatgctcatctatcagggatttactttttggctaatgatagcaataacagtttgtatctgacaggctcaactgggcatttggagtgagatactctatatttgagctcggattgtgttagatctatataattttctgtgctactgcctgggttgttcccccacatctgccaccaaagtttgtatttaagtatttaaagagaaatgaaattgtttccaaggagaaatttgtaacccacaattatatcaaatgagttgttttcgtatctttatctctacaatgtcattgttcaggtgcatttggattttgtagatgtgactgtaaatgaggtacaattgatttcaaccaattagatgattaaggctatccactaccatgtgttcacaatttccaaacgatactgttttgatttttttgttctactataaatttattctcatagaaaacataataaatattagtatacaaacgatggctcttttaatcttaccaccataattgtaatcactgttagcaatatctgccttttagaaactcaatatatttttatacatagtaatatatgtccacatagatgaacatacaaattgtgagcattcacatacaataaaaattagagatgtttttctctccctttttcttaattcaattttataaaaataaatgtctccttgattaatcttttaaaatattattttaaataactgactaaattacctcattttataattttatttagcccattccctcacatttgatacatttcaccctcttgaggagccctatgatgagtgctgcattgtaagtttattctcaacccttgaatttaattatattcttaatatttttggataaaaacatagagacatttgataatttaatcattaaaattacaacatcaagtgtagacactaaaataatgccacaacatatattctctatataaatgcaagaaaaacaagtaagatacattgataatgaacaataaggggaacactcctccacctctggtgggagtgcaaacttgtacaatcactttggaaatcagtatggcattttctcagaaatttgggaatcaatctacctcaagacccagtatacctaaaggatgctcaatcatacaacaaggacacttgctcacctatgttcatagcagcattattcataaaaaccagaacctagaaacaacctagttgctcttctcttccaaagaatggataaagagaatatagtacattattacaatggagtattgcttagctgtgaaaaagcaaagacatcatgaaatttgcaggcaaatgaatgaaactaaaaaatatatatatatatcctgagtgaggtaacccagacccagaaagacaaacatagtatgtactcactcataagtgcatagtagatgtaaagcaaaggttaacaagactataatccacagctccagagaagctaggtaacaaggagtgccctgataggggcacatggatcaatcaccctgggatggggaaatagataagattttctgggtaaactgggggtgggtatgacagtagaggggaggggatggggaataagaccatgagggatcaagatggctgagttgggggagggattcagtcagagagcaataaaagcagtatcttgatagagggaacctggtactaggtaaattctcaggaatccacaaggatgaccccagctaagactcctagaaatagtggagagggtgcctgaactggccttcccctgtattcaaattggtgactacgtgactaccctatctgtcatcatacaaccttcatctagcaactaatagaagcagatacagagatccacagccaagcaccaggctgagctctaagcatccagttaaagagagggaggaggaattgtatgagcaaggggggccaagatcatgactcagaaacctaaaagacagctgacccaagctagtggagctcatggactctagactgacagctgaaaagcctgcatgggactgaactaggccctttgcatgtgaaatacagttgtgtggcttggtctgtttgagggcaccctggcagtgggaccaggatctatccctggtgcatgagctggtttttttggaacctatcccctatggtgggatgccttagtcaaccttcatgcaaaggggaggggcttgatcctgccccaacttaatgggagctttgttgactccccatggaaggctttaccctttctgaggagctgatagggagtgggttggaggtgagtggagggggagggggaactctggttggtatgcaaaatgaataaaaattttaaaatgaaaacaccaaaaaaaaaataaaaagagagtgagagcaagataggaaggggaaaggaagaaaagaaagaaaaaataaggaataagggaaaagtaagtgtgaagtataaggtatttcttaacattctattcctattagtgttgtaaataaataatgatgaataagtaatgagtgagcctccttttgggaaaattcactctgtaattatttatagataatactcttattatgaacaactttaaaatagctatatataatctatgtatatatgaacaatgtgatatcaaatcaaaataaatatgcttatatatgtaagttacttattttaatcatatgattctcatgatatataaggaaaatagaaagactatggaatactttggcataattaacaaatcattttttaaagtttttatgttttgatttcattttatattccaagcacagttttccctctcacccatccctgttttctcctcccacacccactcaccttccctctaacccatccccagtccactcctccttatgggtaagggctgctatgtggagtcagcatagtctggcacgacagcttggggcagggtccatcccctttccaatgcattaagactgagcatgacattccatcatagggaatgatctccatcaagctagctcatgtactaggttacatcatggtcctactgccactgagcatggcattctaccctaaggaatgggctccaacaagctagctgatgcaccaggtttgtatcgtgttcccactgccaggagtccctctgatagtccaagcttcacaactgtctgccacataaggagggcctagttcagtcctcttgaatctccacagttgtaggtctagagttcatgagttttccacgagcttggttcagctgtctctgtggatttctccatcatgatcttgacctcccttgctcatatattacctcctctctctcttggactgaattaccagagctcagcctggttcttggttttggatttctgcatctggtttcatcaattactggatgagagttctatgatgatagttgggctattcatcaatctgactacaggggtaggccagtgcaggcatcctttgctagagtcttccttgtggattcttgggagttaccctagtaccaggtttctccctaagcccatagtggttctctctgagatatctctttcatgtgttcactgtacagtgaaatgtgtacttcacaaaaggaaattaaaattttccatatgggagatttagaaaataggagaggtgacatttataaaaagaaaagataatacagtaatatggggaaagggaagacagaaatattaatccttacctgctgctagccatggagaaacaaagttcatggacaaaagacactgtaaactattttcaagaaaactgaaactctctgaaagattctagaaagagagggaaaaaaaagaattcttataaaggagtcagagtcacttatcaaacttattaataactgctctgacagtaggataactattcatacagcatctgctgtagatcagataccatactaatatatcaacaattaggaattgggtttactaagtaaaacattgggttttacattcattagtttattatcttggagggggctctgtcagttaattcattcattcattcattcattcattcattttgaagtttgatgagccagtccccacattttaagaggcaagaattacagcccactgtagttacatgacaaagtctgagaattaatactgaagcattagggattgctgccagcgtgcacatgcatagaaataccatctatcaataggatatgtagatgtatctattctgtgcatctatctaggaagatataaaccaatgccttgtcttttcagtctaggtaaagcacagtcacaccaaagaaatatgtctactcaagcctactttggtgaccagtgagaggtttgcaattataggagtataggtgactcaaaagcccctatataactgcaagggccattcagcatgagtaattcctactggtagatatgtcagtggagttttctatgcactttgctgacagctcaatctagaaaggtcattggtcaataaactaattgtttacagtttccatcagcttgagaaagagttggtgagacttttgaacattttattttttaaagattgctgaatctacagggtgagtctcagtcctctccctgggagagaatgtttcaaacatgagaaaacacctatacaaaagcattcatatttacatcaagaaaagagtatttgaaaatgagttaaaattttaaatactgtgtcacagtaagcattgttgaaaagcacttgaaggccttctgttcatgatactgtttgttaaggaaatgctaagaggtgagaagagaatcattcagttaaaccactttccttagtaatgggaagtttagtagcagcagataaaaaatgatccatcctgaagaagagaaagttttattccagagagtattaagacgaggtctttcactgtgttctgtaaacacccttctttattgtgtacagaatcttcagatttgccttgagaaattttcatgcacatgagacttatcactcatcctctgtgctttctatagaacatcatattttatcaataaatgattttcttttaggtaaataagactcttgcatttacttctaatgaagcaattactcggttcaaggctgttagaggtgactttgtaacatcagggagaaaaaaacaacttagcttttgctccatgaccttctgaagtcgaaaaaccttaatttgattatatacacacacatatatatatatatatatatatatatatatatatatatatatataaatatattcatacatctagacaatcatacaaaactaataaaatatgacatgaaatttccgtagttttttgaagatctaatttaaattctctttgggtaaaatagatgttttgatagaaaaggcaaggaattcttggtaaaaatatagctgcaaacactatatatgactccaaaatattgccattacagaaagattaaaaatgctgaccctcaaattgtcatcttacttcactgtgcaagctacatgtctgctgctgctaggaaaactttacagggaagtgatggaaggggaagcagctagaaccgattgcatgttccattcaggcaaaatattaactatggtgaggaggtgagtgcatcatcgtatgggtggggaaaagaagtgaaggcaaaggaaaagagtgacttatgcctgcctcttacttgcttcataactggaactgcctcttcctctttatcacacagtaacacagctaatatttcagaatccctgacaagtgaaggtgaagagtgatgggatgtttctgtcaaccgtgtttgtctaacatctacctttattacattagtgtatggcattaaagaattgagtttacattgtgccatgctacaaacagtgcatgattttagtgtctgtactctgtcccagttgtctttctgatggaggatggactgtactttcatagtaagtaagtaccttcccacttactatgaaaacttacacagttaaaactgttccctgtatgaatcgcaatactaaatttaaggtaaaatttaaaaaatgtagtcatttgatccaataacaaatttgaggactagaatcaccttctgaaaatgattaccaagaaaagattaaaatagaagtatttctaactgatttgtctcacaaagattcagaattatagttctgacaaaaatactgtagtatctgtctatcctttctatttcactgatgtcacgctgagttgtcaattaaagatgatatgtacaaatcatttaaagcactaaagaaaaaaacaaaaggttatgaaacgtaaggtcatattcaggcaattaaggaagcaataaatggaaattatgaatgacaagtaagctaagatcagaatgaatggcatgtgtgtcaaacctcaagaatggctccttcagtaggctgctggggtcttggccttcatacagaacatactgtgtactgagtggtccctcttagaaacacacatatcagatgctacattgttttctactttataatttgatgtttataaactttattagtctataaatatttctttgaaaaatgacagtctatgtttaacagtgtttacttttttgaagaataaaggatagtgtatacacaattcatagtaaatagacttctttaaacctattatctataaatatatacttatatataacatttcagttttctgtgctatattgttataaatgccaaacatagaatgaacacaagaataatatcagaatataaatttatgtttgaaagcaaaatctcatgtaacttcctatgtgatttaaatattttaatcaccttataagtttgtccatcacttgaaatttatttattaaatacatataagagtaaaaattggattgacatgtaagacaatcttgtttctaattcaaataaaaaaataatctgcaaaccaaaaaagagtaaaaattttcatgtgtgtcgtttttcagagtctctgagaaaagtaagaatcacagtgaaagttcaaattctattaattttatatcatcaacacatttacacaattttgctggagtaaacccagatgtccctgactatgccacggctttagtttgcctgcttgacatacacagaacccatcccagagcactatgtgacaactgatggagttcagagcaccaggtagcatggaggctagaatgccctgttgctatggtcatgagtatcagtggtaatctgaaaaccttgaaaggagagcatttttgtcttcactacagctctccaagaaagtcagcttttgaatcaaatgcaaaacagaggcacaagagcaattgagtagcgaacacagaagactatgtgcgttttacgagacttaagtttgtgagatatacttttctacagagaacacatactcccttccattcattcatgctattcttgctttgatgtcatctttgttaactgttctttttctctagtctaggcagactaccccgattgacccttaaagcacacacttctcactgggtatattgcttgaaatttcctggtaaatattacatttaattttctttgaccatttcatactgctattgatttaagagttggtatagggcaagagttggtatagttgacccttgtgctggagtacctggtttactgcacaaacactggaaatacttgtcacttcttccctgaaacaactggatgaacaatgaaggaagtacatttgctatcatctgtagtgtgttaccagaatatctgtgaaaatgtcatggttgaaagcctaagaagaaatgaaaataactactaatataacccaactttaagttctagatttggacttaatgaaagtcaaacaatgttgacagtaagatttatattcacatttgtaagtgggaaggcatacaagaaacttactcagattgtattttaggaagaaataattgacaaatgaaaaagattttctgtcagtattctgaccacagagaatagttggatgaaacttttatgtgtaacttcctacaacaacagtataaatgtttattataactcaagaaattagcactattcaaaggccagttaaaatatttgtactatgagataaaataagtgtaactatttaagagaaaacaaattaatcctttggttgcaatgtcaatttagaattttggaataaagcctttacaaaaggcatccagagtcattactgaaggcagccatgaagacaaagatgtgtctttaatgttgtttttgagaatggttgaactgtcaaggcattttttaatctgttgaccttttagcaatatgccaatatgtagcagtatgtttgaattcagatttgagcattgagtactagacttgtagttttattattaatatccaatctcagaaattattctcacctggaagaatattatggcatagtcttctgtacttcattcctattcggtaggaatgaaatatgctgaaaggttcttgtgagccccaactgtgaatcctgtgctaagcaattcctcaaacacttcaaatgcttttagaaagaaaaaatttggacattctatgaaataaaaataaaatacctttaaaaaaagcatccagcatatgaaatgagagagaaaatgtggatatatatacatattggacttttattcagccatcaagaagaacagacttctgtcatttatggaaaatagatgaagatgaaaatcatcatggaaagctaagtaagccagagtcaaaaagaaaaagatcacatatgttttctactaggcagaatatggatcttaaaaataatatgaaattgaaaatggaattataaaggtagaggaggtcagtcagagtgggtaatgaagaacagagtataattcaggcattactttgattaaacagtatggtatgaagtataaaaatgtcataatgaaattattgttttatatagtaaaaaatgctaaaaacctaaataatgatttttttcagaaaatttctgcttacagtctaactaaaaatctattgagagaggttgcaattttagccaatagtacacttaagtttgattgaggatatatggtactggatttaatagcatacgttattcaatgaatgataggtatcttgtcaatgattttatttcaacccatttctaaggaaggtggctccagttatttcttttgttctggtcatttcagttgtcttgaatgtctttagtagtactaaagaatgcagaggccttgttttgatacctacacatgtgggaagcccagctgtgtagcaggaatcagtaaagcactaattcttgcttcttctgctttctcctgtgtaattgtgtttatgtctaactagacttgaggtaccttacttttttgccaagtggataagcaaaatatcatctttgtatacattatcaaagggctcatgtgttagttatagatgtatccagttagaaacacaattaatagtctttaatatcattatttctatgaaaaaggaaaaatgacaaagaataaagtataaaaagaaaaagcaaagaaattgggagatgacgaaagcagaactattcttactctgtcatttgccgaatacccttattgattttaggtgcaggctgattccatatcatatatgttgatgatcacagagataccccttcatgccttcaaaattggtgccacatgggacacttgcatatttcaagtttggctgacatcttgatgtgtgcatccccccctccccaatactggaacccatcttgtatgggctgactcagagaaaacacttcccagagatatcccctcattgaagttcatctcctgttaatcatatctgatattcatctccaactacccattatttattgtcttattaaataaaagaaagtttcacttttatagattcttaattcaagtacattacatgaatggccctggtagtctttgtgtctataggaaacctcataagctggcctccattaccttcattgctctcagcattcttatcatccatagaaccactcattaaatttctttcttttttaaattattatttttttactttttaaatttaaattagaaacaagcttcatttacatgtcagtcctagatccctcaacttcccctcctcccctgccccccaccaaacgccatcccctcccctttctgctccctagagagtgtgaggccttccatgggggatctacgatgtctgtcatatcatttggagtagggaccagaccctcccctgcatatctgggcagaaagagtagccctctatgtggaattggttcctaaagtccattcaggtactaggaataaatattgatccactaccaggggtcccatagattaaccaaacctccaaactgacatccttattcaggggatctggaacaatctgattctgggttcccagctatcagtctgggctcccccttgttcaggtcagctgtttctgtggatttctccagcctggtcttgacccctttgctcatcacttctccctccctgcaacggggttccaaggttcagctcagtgtttagctgtgggtgcctgcttctgcttctaccagctgctggatgaaggctatacgatggcatataaaacagtcatcaatctcattatcaggggagggcatttaaagtaacctctcctctgttggttagatcattagttgttagttggtgtcatctttgtagatctccagacctttccctagtgcctgatttctctgtaaacctaaaacagtctctctctattatggtatctcctttcttgttttcttctattccttatttaacttttcaatgagtgaacttctcatattcttttttctttttttcattcattttttgcatggttttgattatttcttcccatgtactacttttaatttttgtttgttcttatcttccaagtgcttgagttacatcattaagttatttagttatgtactttttaattttttaaaatatatatacttagaaatatagctttcccttgcaaggctactctcactgtcccagtgtattatgtatgttatattttcattgtcattcaaaagtccttacaattttacttcttgattcatttaatgtcaaattaatcatctaataatattatgcttacacaccaagagtttgtgcttattctggaatatcatttgctattgatttccttaattttgatagattttcttttttcccaatacatgggcttaaaaaaaaaaaaagaacttccatggacttcagagaagatgtgaatcctggagtatttatgtgggatatattgtatgtatgttaagttcatttaatgtatgttgtcaacttattttatgttcatttatttatttttctgaatgatctgtactttggagaatgttttgaaatgtaaaggttttatttgtttgttttggggagttttccctttatcaaaatggaatctatttctttgtatattctgattacttttggcttgcaatctatttcatcaaatcatagaatagtaattgttttcaccctgatcacattttctttgaatacttttatttgtatatattttcactctaatatactatgtatttgaatggaaggtgtgtttattttagacaacacaaagatagattctcttgctgaattcagtaacagcctgtattcctttattagaggttttgaggctattaatatacagaattattattgagaatgcatatcagttcttgttaatttgttgactttggagtatttgatttcttagctccactttatgtaacaactatcttagcctcacgtattttcccttatactatcataaagatgattatccaatttttcaggatgaaattttacttccaatattctcttcaggaatggtttagggctaataaaggttttagcctgtttgtttttctcctccacaatcaaaataattgctaaaactgttgggtgaaatagcctggtctggcatttgtgatcttttggacctcaaagagaatatacattctcactgagaaatcatctgtcattttgacaaccctgcatttatagctgacatggccttcctttttcacaactttaaataccttttatttattctgtatattttaattttaatataaatttgattaggttgttttatagttctgtctatttgaactgctatatgcttcttatatctggatggggcacccctttctctaaatttgtgaaattttctactgtgaatttattgacaatattttctatgactttgcctaaaaattccccttcttttcttatgctcagaatttataagttcagtatttctgtgaattcccaaagtttctgcatattgaagctgctggttatttttaatttatcttcttttttattgcatgaccttgtttctaaaccttgatagtctgtgttcttcaagagccattctgatactgaagctttccactgaaattattagatttattgactgtttcaagcatcttgatttcattttgggttttccctccagtatttctatcttgttattgaattcaattttcatagtctgagtatcctcactatttcaatcagcttcttgtgctttgttggacttaatcaggagttggttcctgacctctggttattccatgtgtttattcatgttttcttagattctttcatctcagtggatatgtatatctaattctgtgccttgaatttcattcatgttatttgtgtctgagatcattactctggtactggaaaacatggggaaagacatattttctaaagttttgtattttgttgtattttgcttttaaacttctggcccagtttgttgacatggatgatatttggatgaactgaactgatggagtcaaagagttaccatgtctctttactagagattgggtagtttaggaggtctccatgccaagataggcagagctgaggtttcatttgggctcttttcaggtcaaatcctgtagactgggcactcagagaaggttctaggtcagatacttcataagaacatgttaacagctctaagtttaatcttggaataattaatgttgattgataacatgattggactgagacatatggggcttagtagcatattactttgtattttctctataaggtattttctggaggtgattttgtaagaaaatttctgatctagtcagaaacttgctcactgatgagtttataattagaagagacttttggaaggaggcagagatgttgacaataaaatcaagttgagtgattcagttccagggtcatgtctttgaagtatataacttggcactgatcccgtcctattgattaaaaaactgactagcatatcatttcctgtgtataagatgtatatgtaggagtgtttcctaaaggaaaaaaaacacattgtaataaaattcaaaacttacaagaatcagaataaaacaattagaaaattaagaatctattttcaaatattgttgggatgattataagccttctccttaattttagtggtgattatacaaagttaaaatatttgtcaaaacttatgaatcaggactcttaattttcccccaagagattattttttattagtttaaattagttagaagcaaggctgcttcacatggcaatcccttctccctctcccttttctccacccaaccccccatcatccccccagctcatacaccctctgctccccagggagggtaaggacctccatgggggttccccaaattctgtcatatcatcctgggcagggcctaggccctctcccatgtgtcttacgtttttaaattttttttgaatatgaagcattattcaccaaagttctaatgatacaaaacaaagcttaaacatctgtactacacctaaatgtattgcaaaacattatgacaatccaaaccttatttcaagtttattagaacgtaattattaaatcaaaatgtaaagacatacctttttagatattgtgaaataaatgatatagccattttgttaggctactgccataatcacatttattttcaaaagctattttagcttatgtactttaagctcaataaacattccaaatgtttttaagttgaatgtgatggattgttgccatagtcatatctgataagaatggcaaaagtcatgaaggtagtacaaatgcttgacaaacatccagcaaagttgagctacatgatggctgcagtgctacttttggttttgatatactcctgttgcatatttgaagaacttttaatatttgtacaatatggggttattggattgataggaaatttcttatgaatcaattatggaataaattatgccttctcccagtattgctgcctctaagcttctgcagggaaacctgagcatgctacccttcctgtttttatggagatgtccttatctatttgaaggtcattcttatgccttggagatagtgatgcacataaagtagccagagatctccttgtgaggttctgagatattctagacacatgtactcttgaatttactcagggacaagataatcaaaataaagtaaactttaaaaggccaacaagatttggtgagctaggagagttggctgcaggtcagattacaagcctcttcctactacattctcaggtttttatgtggcatataggcaacaaagttagattagctgaagttacccttgcccttcacaggaacttatactgataggcaaagaatggtgtagaaagatgatttttaaaattaggtgtcagggcctccctttcttagaaaatttagctcatgcagggccactgagttgtcttatgaacaaggagccaaagaatgtcaggattagacatatgaaatatatatatatatatatatattatatatatatatatatatatatatatcttaacattgcattatgctataaattgaacaacacgtacagcagctttggcctgagatttttttcttgcctctagattcttagaaaatgggatgtgtggttgtggttgatgtgtaaaattgattctaaagaatagctctgtttattagtgatgacttaacttgagtgaagaatgattgtaaaaggtaactattttgtcatggtttacaacgatgactaaacttatgaccccagatgtgcaggaagaagagttaaacacatgtctggaaacaaaaatgatatgatctgtgttatggaatgacatgaatctgtccatgcttactgaattctgtataaataaaaatatattttgactgctagttagtcaggcagcaatattctcaccactatcattgcctggctcactttctccttcactgactccgtaactcctctctgggacctggccattacttgggctagcctccagcagatggtttcaatggaaaatgataataattcagatggcctaaacaaagattaatgaggtgagagaaattgtaccacatgtttacaaaatagtaactagcttcagttacaacaataatactttggtacataaacacatagaccaaggagaaaattagagtattatctcaagaagttgaagtacataaaaatttatgtcagagaggtacaaggtaaatgttttgaataaaaattagtttgcatggtttattacccagatgaacaaatacagaggttaactggaaggttatatcagaataaaataatatgaaattaaatgtaagaaaattcagttacttatataactctaggagaaatgatgtataatttcagtactgaaaatgttttggcaaatataatttaacaagcatatggaattaatattgctgaatgtaattaccagatattaaattgtataaatgaaacacaagactcatagctgaagaatataagacaaaaataataaagcattaacaaaaatccctattaaaaactagcactacaaagatttaagaataataagaaatagttaaataattaggtaattaggctcaattcagctgcactggttttagttgttcctagttttgctaaaccacaaaaaatacagaaaatgaaccagtaatttctttcttgaagaaaatattaacaaaatatataaatatctatttcacttaaacttattaaagctcacagattgagataattgcttcttgtcattaagacaactacataagacaaaaaagaatgatatccaatgctcttatattggtagaagcaatattgtgaaaatggccatgctatcaaaaataagttatagatataatgcaatatctatcaaaattctgatgccacatttcacagtttatataaaatggcaacagaaaaaaatagtatgaaaccagaaaggcacacaaataatgaaagcaatgctaaggaataagaacaatgctgaaggaattataatactttatccaaattacactatagagttatagagacaaaaaatggtaaaactatgcccatttacattttgggaaaaacatattttggaaaaaaagatgctgctggcaaaacttaatttctacctgcagaagattgaaattaggctcatctgttttgccttgcacataagtcaatttaaaaaatgactgaaaactttaatttaaaagttgaaatacttaaacttctagaagaaaactaatggatacttttcaatatactggtttaggctggatttttttctttttgtagaaaattacctcgcatcagaagatgtacatacatgaaaataaaaagtctctctacaacagacagtccagacaataggagaaaatatttatccactatatgtcagaaaagtggttaatagatacaatttagggaattttagagggtaaataccaggaaaattatatgtctaatcaataaatgacaaatgaattgaatagacagttttcaacaaagaaagaaagacagaaaagaaacagaaagagacaaaaacagatacacaaatgacatgcaactatttttaagaatgttcaataatagggctagtcagacagacgaacattacatatgtgtctcatttgagactccaaatagctccaaatgtgtaagtacataacctggattaactatagaaagtggtaaattaaaaaggggaccattgtgtggtgagccattgggggagcactagagagggtaatcgttgttgtctaagagatttcccaaacattataatgcaaagtgatgaggaactataccccctttcttcagcaagttgtttttggttagtgttttataggacttacccaccataggtccatagaccagctagcctgtctgtgagcagctagaacctcatgttcttcttccacacaatcccattgcttttttgagacagctggctctccaatccatccctgtgggttgggggctttctctaaacctcctctcctcagactgtcactctcagctcacagctacacattaggacctgcagctgtcctccgccaggttgttcacctcttgggttctctgatcagacttgccatgcagtcttaagttacactatctttgtcagtaggtttggtaggacaattgggaattcttaaaaggaggattagttaaaagatggatttttttcccacattaaaaaatgggaaacactatcacaatggagttatttaggtctctgtatgattgataatatgctgcatgggttgaaaatggaacaattaaatgagagaataattcatttagatgggacttatgtaatgtcaattaataagcattattagttttatcatttgtgttttatcactaaaaagttggttaacatgagtactaaggtacaaattttagagtaacttaataaaacagatattagagatattcagatccagacagaaaatttaatggagatttaggtgttgcattataagattagataggaatagtctaaggtttacaagcaaccaactttaatttatccagtcaccttacaggaactgccaaatgacagatatcttcaaggctggacaagagttaagtggccctctgtgataatgttacatttaaggggtttcaaggaaatgatagtctcatatggcatactttcaccttttcggaagcagactcactgacaccattctgttacaataaatctttccgccaaaaggagcctaagccccactgccacgtgtgaactttacaccagccgccagcccgagttaggcccaaatgaatacacagaaacctgtattagtttcaaggctgcttggccaatgactaggattctcatctgctagctcagtcttaattatcataaatctatatatgttataagacttatcttatcgaaagccaatatggcgtccctccttgccggtggatcacattgtgccactggagcagaagtggaggggaaaaaaggggtctttcctgtttctccttcacttaaatatgagtctccttgctatgtcacttcctgcctggatcagcacttctctactacatttctcagaatcctctttgactcctggtcccgtctaacttattgtctcattggccaaacagtattttatttaacaatcaataagataaacatacacaatacattccccatcagactattaccaataacaacttttaaccaatccccttatacaatgacaaatatccataacccattgaacaactgaaaaacacccaccccaactcttggaaatgtgggcactgtattcatacatcaacttcctgctgtctgggagtgatggcatctttaggatcctaaaaagaaaaaattggattaattgttgagtgctgagtgaggcacctataacatttgttgtctagtctctgcataatgggaaagtgaaaggctcatctcaagccctggctaaatggtctatgaagctagatcatctcagctagctacctcaaaattgttcggagcagtttgtagttcaaagctgatctttaggcagtagttttcatcttagtggcattgttatagtcctgatagaatgatcattatggggcctcattatccttttggagattgcaaaggtcactgttaagcatgatcatggttcactgaaaaaaaaaaaaaaaccttaaaagtttaaagtcatatgcagcagatttcaaggagattaaaagatcaatacttgtaaaaaacatccagtgtacaaaaacttaatttctagttatatgttagagactcaaatgcaaaatcatgcatgagaaactagatgaagcctttttttctagaattaattggtactctatatgaccattaatattatgaaaaaagttaaaaaagtacatattaactttataaatgtttagatagtatttacaccccaaagcttcaatgagccaaaatgaaaccaaaggattatgagattactggcaatacaataggcccttatttttgtttttttctgtcccatatcaagtgtcttttttgacatgagacagagattttggattttactttaagaagcatgctagggtttacagaaggagggaatcacattccaactccaaagtctgcttttatttttagttagagtaggactacagaaacactatttgcattatatgtctgtagagaaaagcagaaacaaaaatctgggaaaatttgggaaaatttatcttgttggagatacgatatactctttttcttgggacattttttcttgatgatttgtcttctttcttcagatgtctaattttcccagtggttttcaaattccttaaccaaatgtcttcattctcatgaaaagacaaaaacaaaactttctccaaccttaattttggggaggctactttatggcatgttatgtttattcaaactaaaatcatttgttagttttgaagttaggctagatttaacagccatgctgtttgattaactatcacctcctctaatcaaggaggtctcttgttcaaatccaatctttatcagttgtgatggtatccatagcttttctcctcccgtggaaacaaaagcaaaacctcttgtccagtgtaacacatttcctggttttcattctgaagtcagcacatctttaaaggatacaggcagatgtaattctgtagtgttttcccctattatccaatgtctctccacagctttcttttctttctcattagcattcagaaaattcaatgttaataaagcattatgtaatctacttaggggatctttattacccatttctgtttatttacatatcatttagagttccatttgagctctctataaccacttgccctataggattgtgtggtaaaatgctttctactgtaataagcaaaaaaaaactgcttcattttattagaggcatacactggagcgttgtcagtcttaattttattggtattcccatgatggccataacttctaacaaatatgtggtcacaaaatcagacttttcagaactcaaaacagttatccattgaaatcctgaataggtatcaataatgtggtgtgtatattttaattttccaaattttacaaactgaaacacatccatttgccagatttcattcctttgagcaccctttgtatcacttcctgctggtaatggaattttattatataaagagcaagtgggacttttttttagaatttccttggcttgttgccaagtgatggaaaaatctttttttcaaacctttgctcttgacatgttgtttttatgaaatttgaaggcctccagctcatttcctaccaataattgatcaatttcatcattgctttgtgatagatggcctggcatctatcacatacattttatatttcttgtaactgaataaataacagtcaattctgtatccttgaaggcttcctttaggccctgtataactttagtaaatgacttttctttcctacttcctcaattctgtcccaagcatttaaagctgctgtgtggcataaaaagagggtgtggtcaccatgaagagatggtttttgtatatcagcataatttccttctccaagaagttggtcttgggaggtttccacacctctacccatgctccattcttaatggttttagcctcatctttccaccaggtcttccattgtcatcaagaaccagtctctaaagctgctttaaccaagtttctccagtctctagagataatgccccaaggttcccagagaaagaggtaaacctatggccacagcctgcccaagaggcatcggagcagcttccatatgctcgcgctgtctcggtgctcttgggctttgggcttggcactacagagatgataaagacagatccagataaagaaaaacctctaaaggtttacactgcgattgaaaatgtatgtaggcttgtgggagaaggaagcagagacaggcagattttcccctgtcttggggaaaaaagaaacaaaagaaaagtaaaaataaagtaataaaaaagccacataaagatggaaaatacacagagtatctggatactctaggccatattgttgtctttaaattgtttgattgccaaggaaagaattactgctactaaaatacatttgattataaatgctgctaaattacattttaaatttgctttgacttcaaaatttaagtttaaggacaggctacttagaaataaaagttttgcttatatttccacagaaaataaagagctatggattccttccagactaatatggtttgattaagcaagaccccctgaagctgagacgatacagccttacagactacaaaaactaggagttggtcaggtttctatgttttatcatgatccccatggtatatgaacatcgtccccaatcagcaggaagcagtttagaaagaacgacgcccatattcccaaatattgtttataaatgtttgttttcatttaaatggggttggttataaatgataatgagcatagtcaatttctttttaaagaaagaaaagggaaataagatataggaatgaatactttgcattggtatagattttcatttattgatacaactttaaggtccattttgtgatatgtatatgtctcctcttgtttaggtattgtgtttatactgatcttttacctataatagtcagaacttataattaggttagttaggttttctagatatacagaaatgcatttgagatagttaggtattcttcaaacctttcaaggacctacagaaatatggcatttaaatgatttagggtttatcttggcagtgagacacaactgctcctggcacaccaattatgtcagaaaggaggatgggcatagaagaaacttgttatggagtttgctttcaacatggcaagattagtcatttgggcaagaaactgctcttgcttggactgtttgttgctgaataaactggacatacaggacccacaagaaagtgactgctgaacttacaaaacaagacagtactgaagggttcctgttgaaatggagaagtgtgccagacacactgtggcctatgggctgaagatggatgccccaacattacagaggaactttgggtgactgtccaggtagtggatgtcctgtcaaatctagagtttttttttatatattatccttctgtggtctttgatagtactgcgtatgtttatcttattgattgttaaataaaatactgtttggccaatgagacaataagttagacaggaccaggagtcaaagaggattccaggaaatgtagtagagaagtgctgatccaggcaggaagtgtcatagcaaggagactcatatttaagtgaaggagaaacaggaagggccccttttttcccctctgctcctgctccagtggcacaatgtggtccatcagcaaggagggatgccaacatggcatccgataagataagtcttataatatatatagatttatgataattaagactgagctagcagatgagaagtcctagtcattggccaagcagctttgaacctaatacaggtttctgtgtattcatttgggcctaactcttggacgggtggggctctggtggcttttggcggaaagacttattgtaacaatagtcaggaaaaaaagttgaacaaagattagtttcagagtccttgttttgaaaggaaaaaaaggggctacagacatgataggataaaaggtagattattgactctacttgtaagccaaaagagcaattactagttttaaatattttacattgctttgaatttctgtatattgttagaacatattgtacatgcatttctaaacttgttcaacatattggaactatgcaacacatttaacaatgcaatggaattttttaaacactgaaagttattattaccaactatttaggataataaggaaatgcaggttagtaattagcaacctattacaatcaaacttgtagttatattagttatgtcttcaaggtcaaacagagatatgtttaagacaggttgtcttcaaacacttcaaaggtctgcagattatggtatttaagactttttctgtttttaaatacattttatttaaatttaaaacaatcttattttatataccaatcccagttctctctccctcccattccccagtgccccccaccaacccccatctcaccccccatccactccccagggaaagtgaggccttccatgggcatcatcaaatctgtcacatcatttgggacagggcctaggccctcccctgtgtgtctaggctgagagagtactcctccttaggaaatgggctcctaaagcccatttgtgcattagggataaattttgtttccacagccccatagactgctcaggcctcccaactgacacccacgttcagtgggcctggttcagttctatgctggttctccagctgtcaaaatggggtctatgagttcctacttgctcaagtcaggtgtttctgtgagtttccccagcatggtcttgacctctttgataattactcctccctctctacaactggatttcaggagtttggctcagtgcttagctgtggatatccacttctgcttccatcagctactagatgaaggctccatgatgacatttaaggtagtcatcaatctcattataggggaagggcatttaaggtattctctccactattgcttagactcttacttgtggtcatcctgtggatccctggacagttccctagtaccagatttctctttaaacctataatggatccctctattaaggtatctcttttcttgctctccttctctattctttccctggctcgatcttcctgatccctcctgttaaggtttattttttcaacaacataggttggctaaagagtctggcacagctaggagagagctatgcagtcgaatcgaaaatgggagcaatggtgtgagagagtgaatccagagaaccaggcagccctgcagtcgtaggtaagggagactggcatctgcctggtgcagggcaaagggcaaaggaagtatggtgagccacccccaggctgggtggacagcctgccccttcagggtctgaggtgtttataggactactaccccaggacatgtatgagcaccagctgaatctactcttacagccagtggggcacctttatgagttttgcctgatgatgaccttcagtggtttgaactgtggctttgccttacaggcactacagatcccagcgtggttcccaggtcatttcccagtttgacaaataatccatcatacccacacaagagcttactatgaatcttttgtttttatttggagaactggatgaaccaaagggcccttcttttttttcctatatggttgtatttatattaagcctctggttgttataaaaaacaaacaaataaacaacaacctataggttcttgttgttgtttttccttgtaattacaaatagacatgtttgttccaggcagcaccaatctgcttcaaagaaaatgatgggtattgacaaactccacattcagtttactttctttgtggcaaaagctagccactgggcaagaaagtgatcttgtcttgaatattgacaatatgctgtgcaaattggacaagcaggacacaaagaaaggactgtcaaactttgcccagacaaggtaggacaggtcttcagaataacctgcttcacataaaattctgtcagatatgcaaggcctataaggcaaagatggatacctcaatgttgcagaggaaccttgggggactgtccaggtagccagctgtttctgtcatttctcaaatgttttggaaattactttcttgtacttcctgcttactcagttaatcttatttccttcttgagtctctgatggagttgaagacataatttagttagttttccttgttaccagattcagaaaagaaattcaataaagaaatgtaaattgtataaggttgagagacataaagaggtagctttggtaatgcaagtcaaaataggaagtgaattaaatacatcttttggatacacaaagataggatagatatggagtattttctctgaatttgttaattgttaattgactagaaattgctgatgtatttattacctgtatatattgcatatagttatttcacttattgtatatagtttttctaatattagttgtaaccctttttatattagacacaaaagggtaaatgtggtgataccttgtttatattctaacaaataaagctttcccaaagaccaaagggtggagctaatcattagctaaccatagatttctggaggtctgtacagatatataggaaatgagatggctgagcagagagaaaaattacaggcaggatgagataggaactcactctcttttcactctggggatttcgtagaggtggcttctctgcttctctgatctttctgaaaattttatagtggctggctgctttgcttctctgatctttcaactttcaccccctaatacctgactttcgatttttattattaagacctattagaacttgtgttactcaaatcagctctaattaataagaaacaagacccactgaaatgaaatattcactttattgggacagttgtttgggggatatctttgtttgggaaaccagcaatgattaagaagcgatcatcactgacacagaattatctgggaagtaattcctcaaggccagtacagtgaaagtgtgattcggagagggccaaagctgcatctcaaactggcagcggaacttggtattatgtaagaaattcctaaatgctgctacctttggtgtcatgaaacagcaagattgaagggtttataaagaatatctgaaacttggcattgtgagaggccagacaacaacggtgaaggtgctgccttgcttgtactgaagattgtggcatattgcagtaccaatacctaaccaatgtcagtaccagctcatgtggattaaagttggtttttcctattaaagaggctatgaatatcatagatactgtagaaaaagaggtataatcgcccaagccctttagaatccagaagatcatgagataaacatggatgatcccatgatcctcagtatcccatgttggaaacatggaatgctgaggaacttacactgttacattttggtttcatcttgatcagattgtaaatgtggactgattcttctcctttggagtaagtaatgtactttaacttattttggattttgcctgcaaaatccccacagctaagagactttgagtatttaagtgatataaaacttttaaaattagtgcgggacttctaatattttttattttgattattatattaatatgagatattggagataaacaaaagatgaaagattgagttaatttaatagttatgtgtttgtgtgtcaagttgacaaagtcaattgtgctgtttttttttttgtctagttgtcataacccagaatcatattacaagtgaaattgtcccattagattggcctgtacacaattgtgaagggtattttcttaattaataatagatagggacaacactgcccactgtgagaggtttctctactggataggtggtcctgggtggcaagccaggagaacaggtcaatagtcattgtttttctatggtctctgctgtagttcctgtctctaggtcactcctctgcttgatttcccaactatatgtccttcaatgatggactatgattggaacatgtaaaaaaaaaaaaaaaacaaaccatttcctctacaagttgcttttgatcatggtgtttattacagtatattacaatactaatctaaatattacaatataaatataagtgcaatgtaaaaaaaatctaaaacataccttcccacatatcccagtgctggaatcacaggtgtatgcagccattactggattttacatagctactgaatatccaaactcaggtccttacattttaccagcaagtgtctttacctacagagtcatttccctcctgtcccccactttacaataccaatggttttatatgttttcaagcctgttcttaagaaactttatcttgatttattgacatttttgcaaacttgtatctacaccataagtcaagaatcctattgttacctaataaagttctctgaaaataatgcagagtattctagcatgcaacatttgtctgtggctgatgcttcttgtgttcctccttggtagttttggtgagggtactttgaagcattattttcaaaaatcatcctgaacataaggctgcttacactttttagttgttggaatacttaaaatttcttttcagagaaaaacaaaatgaccacttggcttcttatataaataacccaaaggacctcactttcaaagtcaaaagttaagaagtaagatgaaggagtagttattctacaaagttggatggcccttgatactttaacaacaaaaggaggggagcttgtgcctttactgggtggacctacataaatatgcttggccatatgtacatacctgacaacttgggcattgtgttttccagttcactaagatgtgcctcaaattttgccttaagtaaaaatgaactagtgcatttctcaaggaagcaatcatggtgaaatggatccttccataatttggattcaagcacaccagtctactctatgctttattgtttatatgtgttaatgtgctgaatatgacagcttcttcttccaggtctctactgaatgacagtcttccagcctaccagctcagactactcatcccagccttaggtcaggcagaacaagactttcaatacctatgcaggcaatgtctgtgtactttgcttgagaaagcccccaccccaaccaaaaaaaaaaaggaactgcttaagaattaagcaattgatagtttcagatagggaaattgagacaggatagaaaaatagtgacaaacaacatggaaagaaaaaggaaaccctcacccctaattgcagaaaataaaaaggataccacaaactattttgttgttgttgttatttgttttccatacaggaattctctgtgtaaacacagtccttgctgtcctggaactccctctgtagaccagattgaccttacactcagaaagttccacctgcctctgattcctgactgctgggactaaatccttgtgcccttatgcccagctcactaactactttaacagcaaaagcaagagccttatctggaatgtaccttatttaaaacaactatgccaagcttttaaacataccttttagaaatatcattttgacagttgtcctgttcctttgtcattatttttcagatgcttaaatgtggtactttcctttgaaaagcccatgcccactctatcactcttttgttgtacatttctttttctcactctcaatagcatgatttctctacttgttttaagatttttcttaatgaactctaactttgcaatatatatccaacaatttaacacaagacaacagccacaataaacaaaacagaccacactgtttctccttgaacttaagttattcttgacaaagatttatcaaaagcgtcaggcctttttaccttttgccattctttctcacttatatatttaaattcatcctgttttaggctgtctataacaggaaaattttaaacaatggttatatttgattcatttttaaaaagtttaaagacttgggatgtgttaaacgttgctaaaggaaaaatgtaagaaaaattgcaatcaagaatatatctagagacaggcattggtggcacatgcctttaatcccagcacttgggagtcaaaggcaggcaaaggcaggcagatctctctgagttcaaggccagtctggtctacaagagctagttccaggacagccttcaaaagccacagagaaaccctgtctctaaaaaccaaaaaaaaaaaaaaaaaagaatatatctagtggttctgaatgctgtacattaagtgtaagagtggtgaatatataataaaaatgttaattcatggctgaaatatttaagtaaagaaaaatgatagcaggagaataaaagatcaatggaattcaagtgataaaataaaaatcattagataagctttgtagagaaaaggaaagctcaggaaaaaatatgaaaagaaaagaaatgttaataatatccaaaggggttttcaaagaaataaatagggattatgtatatactaattaacgggaggataatgaaacccacaaagactttgaactgcctatgatattgacctgctttctaaaatcatcttttaataacacataaggttttaaaagaagacaaggtaggaaattgaactgaagtaattaggatagaataaagatttcagcaaatgggagagccacaggacaggtcatttcagaaatcaagtattttgcttttccaccacattatctagaacattgagtaatgaaacacacacacacacacacacacacacacacacacacacacacacacacacacaccctgatttaatgccaccatttaagacagaataagtcataatctattcagtaagctttctccccagagacagtgttatttattttcacaggtactttggcagtataaaatagaaaagccataagcaaataaggctgtgttttcttaaagggagagcacctgtcatctcaactcttagtgaaataagaagacaaatcctaagataaatattggaagacatctagaggataaatgaattatgaaaaacaagcagtatgattttacaaagaaaaaaatcatgcaagaccaatttaattgccttttttccccttgtggatcaaatcatgagattagcagatgaaagcagcaatggatgtgctgtatcttattccagccaagcaaagtgactgtctatctcacaaattttactcaaaaattagctcaaaacagcttagatagaaacgtctttttttttagactaaaaatcagttgttgtatcacatgaaagggctgttaataaacagtaattttcctaagagggagaagatatccaggagactgccatagaggttaacattagtccagttattttgaagaaactcattaatgaaggcaacaagaaagtaaataggatgctaattaaattcacaaaccacacaaagtttgggaataatgtacatatcccccagatcaagaagcaataatgagctgtgaggatgtttgatttatggtcaaaattttatgtcaactcatccaacttgaagattcactagggaaaaaattcttagagcatatagaattctgaggaacaagatgcttgcagcagctgcagtagtggaagctactgggcatcctttattttaaatacataggactagaagtactttggagtttggaatttactttgtaagaaacaaagtttgtagtaaaagtatgtaaagactagaaagttcaagtttagattagtatatccaaagtagggattacttcgactgtttatgtgtgcataatagtgcttgttaccacacaattaaagtaggctagaaggtcagaggtattttaaccaaacatatcaatatatttataacatttcaagagatacaaattcttcttataaaatgtaagaacatattcaggccaagtttagttggctatgttggtgagacatcgtgggtgcatcatttagcattccaaggagacaatttcacacaaaacgtgttcttctgggtctctcaatctaaaaacaattaacaaaattttccaaaaagtaagaactttaaaacttttactgtcttccaagcaaacaattagtttaaggtgtaagttaacttactatatgagacaaagatgctcaaccaggcagtgtttctatttcatcctatttagaatatatctaaaatttgagctatccatagaattgtttcatgtttgaaatgcactgaacttattcatgacacagaggaatattaagttgtgtttggaaatcaaaacattcttctttttgggggtcttttatttaccaaggtagaagaagcagtgatgtgtatctattgtggagtgtggggctggtcattttatctttacccaagaggatctttatcatgcatcaagtttctacacagctcttataagaatgctatcaggaacattatggtttccagattaatggtttaggcactatgagtaagacaacagatactccacatgaggcaaaggtttgaaatatgcagggagctctctgccaccctcactatatcaaacaaaatagacacaggactatattcactataaaaacggcagatagttttagttaaaatcaaaagaaattaattttcttctttgtaacttattgtttaccctgcacaaatgttggactacacatttaagatacccaatattatattatgagtcatatatatatatatatatatatatatatatagtgacaatctttataaagattgtcactataatgaagcaatttatcctacccatcttttcacataattgcttatttttgtaggaagaagagctaacaactaacttagagattcccaaatgaagcacaattatatcaactgtcatcatggctctggatctcttccctcatacctgccactttgaacctttgcaacaccattttctccttactctcccatcttgtaactaccattttgttttaatcactatagacttgactttttaaaataattcatacattagtaagataatataatacttttatatgtatgtctacatatttattcatataatttacttcagatgcctctgaattttgaaaatgttaagatcttatcctttagggaaaaatatttcattatatatatatatatattttttttttcttgataggtttctcccatatcattgatattgtgaatacaactgtagtgaaatgagaatgcaaacatattcaggaagggtgacttcctttcacatgaataaatatgaaaggaaatttctggattatatttattccaaagggagagtggattgattgcatgctttagatgtccattgctgtgtttatcatagttttctttaacagcctttttcttatcaattccaaatctgtttaattcattttcttctttagagatctgataatttactattatgaccaggcccacaaactttattattgtttatttaccaattagaaatgtaaaggcacatttcagtttttcaagtttgagttcagattgttttaggaaatttccagtatcttttttttttttcttttagggctgtctttaggccacctcaatctgcagcttggatgccattaaaaaagtgttccatccaggcccacaaaggcttctcattaatagttttgattactaagtatatatgaaaagaccctctttggaagttttatcaactttagaaatgactatagtttccttaagaattataggaagtccatgatgctgggccatctgaaactcttcttcacacttttattcacttagctacaacacaccgttaacaacattctgcaactgatttcaaagcaatgaaagtgactttgtttccatgatttctttccacattacaaaagtaatttgaaataatacagtagaattcaacactgaaaataaaaatgtagtttgtttcatcttcaacaaagtaaaatacaatcagacaaagcagaaaaaacatcatattttaaccagatgataagtggaaccatccagtaccatactgatttatgatatagtcaaatgccaggacagagacagagatattatttatgcttccattaatggttacaaataactattcataattatacataaattataggaacacattagtgtatacagtatgtatatcaaataattttagctggaattccaaattggtgtctgataacttattccaatggaacacattgtttcttttcttaaaacagcaatcttttcttagtattcatttccagttggatgttttaaatagacatggcaatagaatgcatgatgaacaacttttatagccctctgttccccaaacgcttctcatatcctttatctagcaagtgatgctgtattttaaataaattttagcattcttatttaacactacctttaatgtctttagtgccaactcattaacaaattacataattttgacccacatctcatttttcttagtgaaatccttaatgcacaatgcacatatttggcattaagtataatgacactttttttttgctctttccagtagagttatttagctcctctgttgacaaagtagaataaactctttataattgacaaatatatacaaactagcttgggcaagcattatgtttttcatcatcatacttaatattttccttagtgctcagtatttgctgtctcattttactcatggtttcttatggttatatatatatatatattatatatatatatatatatatgcacaccagttgattacctgattctaagtggtcatccctgaaaatgaaatcaccaattatacagacagagcagtttagtcacttctagatcttaaccattgtattgagtaagaggaaatgtcagagtagatttaactggatttctctaagtactaaaggcattgcacatttatagatttttttagccatgtttatttctcctcttgagacccctctctttagatccataggcaaccaattgtttaaaaacttcagaatatttcagtacatatatgcaaatatatacagagaaaaacaaatactaaagatgtgccacaaccgattctctcttaaaatagagacaaagctgtagttttggtaacttgcagtttttttttcattctttttaaatacagttcttttattttttgagactataattacatcttttcctctttcactttcttttccctaaatacttccatatactcttccttgctttctttcaaattgtggccttattataaacagtgatacccatgaacaacagcaatgactagcataacataataaccctaagaactttgcagtagtggcatgcttaccttaattggacttaagatatagtcagcaagagggaaatattgcatgttgtcagagacctaaccaactacccagaaatcatgaagtcatgtgttttggaggagaatctacaactacaacattactaaaccagcatagtccctaactacattctaaacatttgtcttaagcataaccctcacccttcattgaggaaactttctctttgtgcaccattatagaaattcacagccaagcaaaatgcagacctggagaacccaatacaatctgctacaaatagaacacaacttccttactattctgtttatcctctttcctccttcttcagtatttatctctatcccatctctaattagagtgtggttttcctcccatttacctctttagacaatttgtactctgatattcccctctgtctggctctacaactccattatcctgacatccttacaatggtcccagtaactttcctgttctctgaagttacttgatatatatatatgtgtgtgtgtgtgtgtgtgtgtgtgtgtgtgtgtgtgtgtgtgtgtgtgtgtgtgttaggtctataccattggcctgggcttcttatccatcctctataattcatacatttttcttttcatggcagtgttccgtttttgctctttttaatcatactttttgattaagtgattcaattcctcaacttcgttttcaagtcttgatagtctgtcttctcctttatccatcctacttacaagatattccactgagttttttttaattagggttgttgcattgtcagttccaattttcatttaagctttggttttctcttcagtagtttttatgttttcttgtaatttaattttttcagattatgactattttttgtatctaaatcagctatacatttgtctctatttggacttcactcagaagtctgctcctattctcttcaaattcatcaagctgtttgttcatgtttgtgattgttcttttaaattctgtgccacggggtttgtctagataattttcattggagacagtttctatttcactgttatttgcgggggggggctgtctttcgtttttatattgtttgtgcttctgggattctagctgcctttgttaaatcaatgtgtatttttttgttgcttaagcttggttaatttccaaacaaatatgaagattttgtcagtcaatcttttagacacttggttttggtttttctttttttaaactgtgtgttgggggggtgattgattccaattcagtggtaaccaacaaagtatggagatggaacttccttgcctggggccctgggtagcctatagtactcaaagtatgtttagggggatgctgatgacttaactgggctaaaatctggagcacttatgtgactaagctagtgaagaacctgaattatcagacttaactatgcctgaggtgagagatggtattagaggcttaccaggctgggtgagcacaaaagtttcaggaccatagctatgcctagggatggggatttttaattgcaatattaacacagaaaataaacatgaacaaataaatgtctgcctcttaacaatggtcatgagttaatgatatttagtcaagtgttaaaaatattgatagtagaccacctttacttataaacagatattcttcataatttttgagtaatatgggtattgggctaggtatcacatgtaccgttctataataaatgaatggatttttttgagcatcaaaaacctcattctccttgcatatttgcttgcaagctttttgtaaatggataaatgttgagacaataatagtataaaatgtatatgaattccttcagtaatttaaagtcacatcaaacagaggtcagagggaaacacaataatttaattaaattgttctttgtcttaagtcatagcaataatcaaagttgatactgaaagttgtgtacaaaatagtttctttaatgaaataatctctagtcactctattttattagttctttgaggatttaatataatatgttttgatcatattcatcaatctgactcctccctcctcttccctaccccaataatagtgtcaggtatgagttcaaacttagagaatgagctttgaacccattcagaaagtggttggttacacccataacacatgtgccactcttgcagtagtggacatgccttgcacagttcattgcttttgtagctctcaggctttacagttgagtataatgcactatttataatgtttcacatccagtaatatcacatcctcaatctatgaaagttagccataagcatgaagattccaccttagtatcaactgatttctctacatcacagtacacataaaggtgtcttcaacaataggatataaaagttctggagggtacacaagagctttgacaatagtaccaaagaatgatgttctttgggatttcatcagccaacaactctaagaaaagtaacccattctttgtactgcgtgttttgttagcttgtagtatctgatagtggcattatttccatcatatagtaactctatacatatatatgtacacacacatattcatacactatttattattagtggattttcatatgagcttttcaaaggaaacttagtgtgttagttacccacccctttaggtgggattctttactctgccctctcattttttaccccatttaaccattttgttctattatttctctttatactttgatacaatttctttctatgttatctcccttaagaatccccacctttatctggtacttcacgaattccctgactattatgggtattccaatggaaaaatacctttctgaaaattcaaaactaatatccacaaaagggaaaaatcaagtgacatttatctttttgaggcttggttacttcagaattacacttaaaatatttttctcctataacatttaatcaacttcaaatgctgaaacagagagaatattcacaagtactataaaatatgtatttacagtaaatataaaaatttgtttgtaatcatttaaatatttttatttatggtctatgcaatttatttctggaaattttgaacacaatagtatttgattttatttaaatagttttatttaatttggctattattatttccacacactctagtattaactatgaaaataacaattaaattagtacatattactttcaattccaatgactctaatattttagattctaaaacagtataatctattaatcagaaatataaatgtgtagttttccctaaaactcatttactggggaaaacaagatgtaatcgcagatgaaaccagttttacaaaccttccttttaaattagcccacagtgatttattgccgctgcaatattgaattatggtactgagtctaaaaggtaagtactttcaagggatgcttaaaatttcatgctggatgtatagcagactttatattatacttagggcaaataacttcttattctatttgcttccaattgttaccctttgaagaattttaatttttaattttaaaagcattcttatttgcatatcaacaccccttttcctggccctgcactcccatcctcccatgaaaatctatttttattttatgggtgtgggtgttttgccgacctgtttatgcaccatgtgcatgcagtgcccatgcagaccagaagaggatggcatagtccctggaattagagttataggtggttgtgttctgcagtgtttctgctctgctctggaagaacagaccaattttcccagccttgttagttgtaattatgataacaaaataagaagagctgatttctatgtattttctgccaggtattttcttacaatcctctttttttgacagatctacaatgtggatgttagtattctttagcttgcatgtgagaagcacaggatatactttttgtgcccagacttacaaaatatatttgaaagaatgacataaatctgagtaagtaaaaatcaaagtcccatagctttaattttcccttaaaatttaatacaaacttcaaaactaatattcataaaaaattaacataacagaactaccatatgtgttgcagcttttcacacatttgcttcatcacctttccacttagtttatgtatattttaggagcaaaaagcttattttacaaaacatcatgcaattaaaataagaccttcctcatgtataagttgttcctatttaatttgtcatgcatgttgaaatttcatgaatttcttcttgactatatctcaaaagatattatctacaattgcactatgaactgaggtaagatcatacagttatcaaacctctttaattttgtgactttggaggattttttgtaatataaatgtttgttaatcataggcacaatttggatttttctaatgttttctcaagattatacataagttatgtactcttaagaataatgcaccataaaagattggctgcaggttctcatgctgtatttcccaaaacttcttttcaaaatggtttgaacatggtgctcagagtccagtgtggaggataggcatagtttacagcagaggagaggacacttcccatcaaggcctgagaacacaaaatgcacaaaggtaccattatgttggtttaagttggaaggagactttatattattttgaaagtctctagaaaaacaatttttttctgagagtctttgccttatctctttgatggtgacagacctgtttggtttgaccttaaaaatggaagaggtataactttgttttttattataaagtctcctgctacaaggtaaggataaggggtcctgggactgggttagatagttatccattgagaacattctagacagtgaagaatgtgttgtctcttcaaagggccagaaatatgactcagtttccatttctctagtcagtaaacattgtcctgtattttcagtcccaatgtccactccggatgttctctgatcctgcttccaaactagctagcaatgttctcttcttattaagttatccatttccacactttaaacttgttgctggtctgtggtactctttatcatgcttacctttactaattggtgaagtagggtttttatcattttgtactaaaaagttaatcactgtttttccatttgcactggataagcaatgtataaagttgtcctaataccttaaaaataatactgtattttattacccaagcttcttttgataacaccctgatgaattcctacaacagtttcaaagaggctactcttctaattataggattctccatatgtttaattgccatctcttaagtgaaaatccctcttaattcacagcaaaagcatcaggatgaactcagaaaatcttacatcattcatttttagtaactgattaatgctgaaactttctcagatttgataagaaagtcactctttaacctaacaccttttgtatccatctgacatcttcctgccatttaaaaaaattagacacacttttattttctgttgaaataagatgatttaatcttattctattttagaatgttctctcttcacacacacacacacacacacacacacacacacacacacacacacacacacacacacacacattacagtctgtcatttaagaaattcaagacaggaacctagggcaagacctgaagcagacaacacaaagtgaagttgtttattcgattgctcgtccatggcttcttcagtttgcttacttacagaagccgggaacacctgtcccactggtcacaccacctgcagtggtctgggtccactcatcaataaagaatgaagaaaatgtccacagacgtgcccatagggaaatctcctgtaagcagcttcttgattaacatttcttcttccctagtttgtgtgaggttgacaaagactgaccagcacagttgataccttgtcaattcaatgcataaacacatcaatgttaaactataaccttttctttcttgtttgttctccaaatctcatgtcaatatgaatgtcacaatataaattcaatgttttaaaagtcccacagtctttaaaattctaatctcttaaaagtaaagacatgccagggaaaagctattctgatccaagaattctgtttttaacttcatactataaacttccttattttaaatgcataattcatagaattttgataaatttatcaagttgtgcaaccatcagttctatctagttttagaccaattcttgttctagaaatatcttactgtgctcatttttatgcaatcaatgcacccctaaatactaatctgttttctaggtctattggcttacttttctaaacttcaatagttaatcaatacttggtatttttcacctgaattcattcatgcatcaaaccattgagaagtgttataatgctgtaggatgcattactgctaaatatttggaggatcaattcatggatgtgcatgcatattgtgttcacttattcaccattagaagaataattgtatttatttgtattgttgccttttttagtacattgctctgaatgttcatacacacatatttggttttgtttattattttattttatttaagttagaaacaaacatttttacatacccatctcacttgcctctccctgctttcctcccctgcccaccactcaccccctgtcccaactcctttctactccccagggagggggaggtcttccatggggtatcttcaaagtctgttatatcatttggagcagggcctagaccctccccagagtatctaggcttagagagtatccctcaatgtggagagggctcccaaagtccatttgtgtagtggggtaaatactgacccactaccagtgtccccacagatttccagacatccaaaatgacctccttgttcagggggtctggaacagtcctatgctggtttcccaactgtcagtctgggttccatgagctctcccttgttcaggtcagctgtttctgtggatttctccagcctgatcttgacccctttgctcatcattcctccctctctgcaactggattccacagttagctgtgggtttttgcttctgtttccatcagctactggatgaatgctctctaggatggcatataagatagtcgtcaatctcattattggggaagggcatttaaggtagcctctccactattgcttagattgatatttgtggtcaaccttgcagatctctgaaccttttcctagtgccagaattctctttaaatctataatggctccctctatttttgctctcctctattctccccctgactagaccttcctgcttgctcttgtcatcctctcccctcctcttctccccttctctttcttctaactccctctccctccctccattctcccagttagcttaggagatcttgtccttttccccttgtctggaggaccatgtatgtctctcttggggtcctccttgtttcctagattctttggcattgtggattgcaggctgctagtggttaagaacatatatatttgtataggcatctgtttgcactggttgtgcaagagttgaactctggcattatatgctatctgcatgtttatagaagaatggacaatatttcttgaagtgcctgcctgtacctcctcatgttcacaagttacaggctccaaatttttctacatccttatcagtgctcatgtttttttttccttctttcccagtctacttttcaattttatagcagtctttacttttccaaagtttttcattttgcttaatcctattatgttaaagttttccctgttttgtttgctttttctctggtttgttactattatcaagtttcttaaagtaaaacttgtgttagttatttgagctcttacctgacacttgtctataggagtacatacactccttctgaactagtcaactttaggttctcaatgcattttttattcagttcagtgtgtttaaaaaaatatccatttgtgatttccctttaaatccattggcaaattaaaaacacactgtgtaatttcttattattaataaatttcatgatttcacttatcaccatgttttattttttcaataaaagacaataaattcttaaattatttcaataaattaatataggcatttttttgtgaggtagctgactatctatactggtgaatatatttttattttttggaggaattcattatggttggataaattgctctgtgtcattcatcttggttgatagtgtgtgtgtgtgtgtgtgtgtgcattccacatgagtatatttactctatagctaggtagaaacaaagtactattaattataacacaggatccaatatcagaactaaaacatgttccatgaatattgtcattacagctttgaaactccctactctgatttgaaagcatcgtttcactgggctcatccaccacctttggatcagtgtcctctggacaccacaaggctgttgtgcataagaactcacagaagtgtgacaacatgtgcaagacctggtccatctcaagccaaacgaaattccagcatgtagaatagaggtcaacatgaagttctactcttagctgaagagctactgccaattcatttcctcttgaaaatgaagagtcagttttctttaaaagtgtagcctccctcgtgtagaccactccccaatggaaggcaatattccaagtatatatgggtaagaaaaattggatctaaattctaaaaaatgatatttatttcaatatcttttacttaaagatacaattttttagacatgttcaccatcctaatatgccacttatattgttcatatttcccttcaacatttggtttgttgtttgtttgtttttagaaagtacatggaatttcttcttataattattttctgaaacagaaaatgctttgtggcctgtaaaaattttatgaaaattttataacccacttatccttcaatctctccaccttttaaatgtgtaaattaactcttttaggatttttctgggggaaattaaagtttaatgttctgtgaagtatcaggtactttgaactctcctgtaaatgaaaatatattttgttcaagaaaatgaaaattacatgtgaagatctgctgaatggctataatacaatatacatctcaaaattgcttctattataacaagtgcaggcaaggaaagtaatgtgaagcctgtgctatactattttaagtcaaaataacccataaatttaacattctaaactgaaaacacacaacttagagcatttctctctgtagcactagcaaagctaaagttttcagggtaaatgttgcttatttttagcaacaccaccttctaatattctcacttatttacaacccatcctacctagtgtagtgattaactacagaagaatctgattatcctactcaccaaatatttggctttttcagaattaaaattgtctgaacagatggaacattttgtaataataattccacattgcaagttgagatgctacattatatttttgagatgataataaaaaattatttgattcacaaaagacttctgaagatgaaacttagtaattttccaagcacactggcctggaacatctgaccatatttaatatcattgctactcaggttgttagttaaatgcatgtgggtatgattggtatctcttgatctcagatatttaatctctaaatttttccttgagaccagcatgagaatacctgaaaagaaacattgtccttcttttagaatagctagaaaaaaaacaatacttcatctgaaaacttttaagctaaaaccacatttgtgttaatgtgatctatgcaacactaattatcagataggtaacttaacattttcaatagaaggctgctgctattctactaagctacatacacactcctttcaaaatactgggttttaaattttttctaatttttaaattatttttaaaatttcataccaacctcagtgtcccctcccttctctcctcccattcctccactacctcccttctacctcctgcatccactcctcctctgtctcccttcagagaggagaagggcttgcataggaatcaacaaagcatggcatatcaagttgaggcaggaccaagatgcttccccctgcatcaaggatgaacaaggcatcccaccataagtaataggttccaaaaagacagctcatgcatcaggaacaggtcttggtcccacttttagggccccacaaaagaccaagctacacaactgtcacacaggtttagagggcctacatcaatcccgtgctggctccctaactccctgtagagttcatgagctcccacaatctcaggtcagctgtctctgtgtgtttccccattatgatcttgatcccctcttgctcatgcaatccatctaccctctcttcaactggatacctgggagctcagcccaactgctggtgggagtgcaaggttgtgtagccactttggaaatcagtatggcagtttcttagaaaactaggaatcaatctatctcaagacccatgacacctctcttgggcatatacccaaaggattttcagctttattattgcaaggacagttgctcaactacattcatagcagcattattcacagaacttggaaacaacctagctgcccctcagccaaagaatggataaagaaaatgtgatgtatctacacaatggaaaaaaacaatgacatcatgaaatttgtaggcaactggatggaactagaaaaatcatcttgagtgagattacccaaacccatgcagacaaacattgtatgtactaactcctaagtggatattagatgtaaagcaaaggataacaaaactagaatcctcagccccagagaagccaggtaacaaggaggaccctaagagagatatatggatctccctgggatggggaaatagaaatagatgatatgtcctggataaattgggggaccaggaggggaataaaggagaggggataggaggatgagaacataaggggtcaggatggtcgacttgtggatgagacagaggaagagactaatgaaagagataatgtaatagaggggaccattttgtggttaggcagagaactggtgccagggaaactcctaggaacccataaggatgacttcagctaagactcctagcaatagtggaaagggtacctgaactggcctttccctatgatcagattggtgaacactccaacagccatcatagagcttccatccagtacctgatgaaaacacttgtagggatctaaatttttttaatgaaaatgaatatgaagtgggtggatgggaaaatcagagcatctgcaagcatttgagaaaaggttgctaatttaaacaaaatacattgtatgaaattctcaaagaattaataaaatatctaataaaataaaaaaacaaaaactttacaccatggatttaaattctgcactcagacaagcaaaccattccatgtgacacacatttcaagtagatatttaaattaaaatgaagtcagttacatcttggatggttttatttttttcagtctaaagaaagaaatctttacagatttctaataatatctgcaccattagatgtgaaatattattaatatctgcaagaataacaatctttgctataagtatgtaaatagggtctgtcttaagctgttttttttttgctataatctaatgccatagacttcatcatttgtaaaggccagagtttactttgattttaaggtctaggggtgacacttgctgaagaccttcttgctgatagagtatctttaaagtgtcattaatcttcactgttaacttactgagattcagaattaccatatagcacaatttttgtatttctaagaaagtgtttacaaaatatttaatcctagggaggactgacccttggtattggtggcaatatctcactggctaaggaccttgattgaataaaaagaggaagccaggtgagcaccaatattcctcagctcaaccaacctcttgctgtcaagtctattccaccatgatgcatgtaaccttgaactataagcaaaaatacagcttttctttcattataaatacatatcaatgataaaagtgatgaacacctactataccacatggcatcatttggtgatagccatacacagaaacagagtcaacctgactactaaaataagcttgtgtttatacagggtctttctatgtaactctagctctcctagaactttctgtgtgtgctagtctagctttaaactcatagagaccctcctgcttctgcctccctagtgctggaaataaaattatatgttactacacctgagacaaacatatttttgagatagttcatcaacccattaacaagttatcaatggatcattctggtgatgagggttaaccttagcatgtttaccataaccttgaaaatgtttcacatacccccctgccattttccagtgaatagggataaatttttagcattacttcttataaggacatccaaagtatagcaatatacctttagtgaacattagaatatatactttattttattataatgtcagttatatgcattgttgttttcatttaagaatacataaaaagatggggctggagagatggctcagtggttaagagcactgactgctcttccagaggtcctaagttcaattcccagcaaccacatggtggcttacaaccaccttgaatgagatctggtgccctctgctggcatgcaggcacaagactgtatacaaaataaataaaaatatttttttttaaaaaagaatatataaaaagtcatatcttacataaatagtagggaaagagaataaccagcatgtataaataaaatatttaatcagacataaaaatctaactgggaagaatcttttccactgtaaaagtctagtgctcacatttacatatgtgattattagtgctggatgctccgtaatagaaatagtgaagtgattacagagaaactgctgtgaacataaaggagatgattgaaagtgaattagtaatacatacactgtaagagaaatcaacatcataggagaaaagtacagctgggacattttcaaaggtcaggtgatggtacaagtatttgaatggtcgaggggctgaaaattgttcattaaaagtggcatcctggttacacgaaattgttttaatgtatactgtcactaagttaaggtatttctgtaatgtatatttcagaatctttcaccagactttgatttagttaggcacagagtgaacacatcttccaggggttaggtttgatcctcactatgagaaacggcgatgatggaagcctagtctgtctctagcatttagcaatgggaatttgggaagtgatcaggctatcaggttgggccttctgtgcctctgtggcttcatgagttttattgagtgcgtatacatgagcaccacttcttttacaccatgtatttccctatgcacctcacagctctgctggtataggtgttatcaccagacacatcactggagcttgaaatataataggaggtaaaaataaacttcttttcaataattttagggttgattccaggaagggctcagtaaatatgaagagtttggggcaactgaagttccacccagtctgcagctgttcaacagctcccatcgtgggttgccaaagcatgcccttggtgtggtagaaatgtggttctctcaatctgcatggaaactccctgatgcaagagtaaaccctcacacagtggcaccaaattttattctaagagatgttggcattcccagaaactgcaaatgctggcatcacacagtggagagctaatgttacgcctgttaataacaagttatcagaacagagtgtccacaatcaggcaagtttggtttaaaagggacagtcctcaaaaaatatgaggatacagaaagttggaaagaaaagatgaaaacatcggaagaattatctggctataagtgtgggaatcagggttcactaggttcagtatagaatgaagtggagtttatttggggaaaggaacttacacaggaaacaagtgactgtcgcattgctccagctccaaggatgcatacgctgcaacactgatgctctccatgacctgaagggggttccaagccccaatcctattccttttaactggtgatgtccacacctgtgaccacgcccaaaaaggcatggtcagtgcaacaggtgtagggggtgtgaatatatcattacagctggcctatattaatatcaattaaaatgtttaaaaggcacaaatcttagattgcttcgttatgcatgaagtttatatactgaagaacagttagcattttatgccatcaataacatacatctacagtgcaaatgcatctgtgaagcaacggaaaatggtctattatataaggacgttttaattcttggtcactgattcagagtctctagagtttataacactgaattagtagacatacaaagatcacacaattgtacaataggtgctacgttagtatgtatttgttacggagtacccaaaggggggaaaaaaaaaactccaagatgcctcagtgagtcatatggagtctttatttgcacctccagcagggatgctggagtatcaggaagcagtctctaactccacttagttcaaatttttaagggcaaaacctacaattgtgacatatacagaaagacagctctgggcatcagcagcaaacacagttttttgttgtttttgtttttgttttctcagaaatagggaaatagcagttaagtggttaggtagttccgtcattcttaaggtcagggacacattgtataggtatttacaattggtccagagaccagtttactctaagagtttatggctgtctactgagagcatgataaatatggttgataacaatatcctatattttaaaagttgtgagatagtatactttaagtgttctcaaaacaaaaatgatgaatatgtgtgatataacatgttaattggtttaatttagccatgccattgtgaacatactgtattatgtatcataatttgtatgactttatttatgagctaaataaatgaatggaaaagaaaaaaaagaaaaaagaagagtttatggctggtctaagtaaccaaagatcagttcacccaagatagttttagcaattacattattctcagaaatacttttcactagattgcataattatagttctgtaccctactccacattgatcatttataaaattattaaacaatcacgaacaagttctacaatgtttttatgatttagcatacatttgcatatatatgtacttatatgccgtcctcttttatatagatagaaagacagataggtgtaaataaatactacttatttgtgtatctacatatcaacctatatttgtacagaaaagtaatagtgatttttcttacagttgtactcgcaatcatttacacacatgtagtcacatatacttctatatgagtgttaatacatacatgaattattcatgagcatgtgttacgttcattagcctatttgtcaatccatttgcacatgaacaagggaatatttaatatttgctaatggggagtgtccttctgtgtatatgtttctcttattggatgattaataaaacagtttggccaatggaggcaggaagataggcagggctaggagatgagaaaaattctgggaatggtaggcagagaggcaccatgaaggaatgccatgcagggactaggaggataggacatgccaggtgttctctggtaagataaagccatgtagaaatacatagattaatatttatggattaataattaagacagagatagccaacagttttataattaatataagtctctgtgtgtttatttgtggctgagaaggttggcaggaccaggtgagacaagaaaaataccagcaactgtttgcaaataagaaaaggaccattttacatcatttggaatattaagatagaaaaagtgaaacaaagattggaattctaaagttttgagcagtattttaccatccaaagcttaatattcttgaagaaccaaaatgcatttcaaaatatcagacacttgaagaatagtgttgcagaaactgtacatgtttgtttttatggttttttaaaaagaaatattcaagtaacagaatctggagaccagaatattgattgctgggatggaaaggaagcatgagtttaggtgtactatgtctctaagaagtttccaaagaaaaatggcatccctttatatacaggccttaaaatttttaatggtagacatagggtagatagttactttggcttgagtttccaagagtccttgtaaattttttgttctcctgtgtttctgagtagttgggagtatttgtggaaatctcgttgatattgcatcaaacctcttctttgttttacttcatgttctgcattcccaccataatcctctgggaaagtttaatgagccttggataggtgcaaactactggcaatttcccaggctcaagagctgtcccacctgtctcagagctttctatgaaggacatctctctcaagtacattttaggagttagagatgtcacacagcactgttgacactctcaatagtagcaattgaccaagggtgagatgaataaatttatactttcacccttagtttcctaggtagaaggaaatgagacacactctaggaaaccatataattaagtaatattcacttatgaagaattgcacaaaaagagtgtttcttctaatggactgtttatctctaaaaccccttactttctagaccacattacctttaacatgaaattggatactccccatgtgctgacatcatgggtccttagttttcatcttcaagtttataaaatgaaaggaattcatttagttagagactgcctgcagtaccaaatgatgaaattaaaaatataaccacaaaaatagatacctgttagtaacatttggaaatggaaaaggcagagtgtaaaaaagatgaattttccaaattatattttgtatctttctttccctctttctctccttccttccttcctttgttccttcctccctcccttcctttctttctttctgtcaccttgacacaagctagcgttatcttggaagagaaacctcaattgagaaaatgcctccattggactgcctgtaagaagactgtaggacaattaggaattggtgtgagaagatcctgctcatttaactttgtgcaacctctgggcaattgttcctgttcaagcaagtcgtgagaggaaagcaagtaagcagtatttctccatggtctcgtcttcagttcttcctccagaaatagaaaaagccctgccctgacttcccttagtgatgaagtgagacctgaaatttgtacaaaaaaaaaaaaaaaatacaacttcctcctcaagttgggtttggacttggtgattttctttttgttttgttgctttttctctgttgactctgggaatttgacatcatgctcacaatcctacttatctcccagcccctccatatccactcctcactctaatagtgtcctccaaaaggaaagcttgaaaaataagatataaacaataacaaataaaaaaagaaaaagaaagacactttgatcctcatctccatggcctctgcattcatcataatggcattggacactgcagagagtccttacccctgcatctgcaatgactttgttggtaacctgaacctcagacatcactgcagaccccgacttcaataggggtatggacacagacatcgccctcggcagcagtttgggcctggtgacaccatggccacaggtgacagtacaggccactggggtggcatggtcccagcagtgacactgacatgcattttatctagccgtggaaacccaaactaagacagaaatctacatggaaaaagagaaaataatcagctttagattattagaaatgaagggatacacaccttagcatttctttcagatgagaacaagaagatatcttcccaaaattcagtgcatagtcaaaattttgttaaagtgagcaaagtacagttataaccaagagaaagttgtaattgctccattttacgattttagtgctacacagtcaggaaaattttgagattccacctggaatcacatctgtatttttatcctttccaggcctatttaacttgtccctctcaaactagcaatgctcctcaccctcacattagcacttctgcatggcctaagatacattatgaaatgtagcacaaactaataaatgacccagagactgatatttggattcagactgaagatcagggaatcaaagcggtacaaaatgttcaagacagtgttgtgacagttgactaatgatgtgaaccactcttgcacacattaatgacaaaaggcttgcatgctggataaatgatctttctgtttgctgatctttcggaggatacatctcaaaggtccagtgacagcaaagctagtcaatatacttctttttactgattcattttgttcctttgttccagattcccaaagagctatagtgtttgcatataaacctttgcctcaggcctgtagaatgcaaactaagtcaaacagcaaatgttggttagggtgggtacttagaaatgagcatgttttctttataatatagaatggagaaagctttcttcagcttcccctggttgagaaaactggtagtcaagaattgtcatcctctttggaatactaaactctaagaagggtaggtcatgatgttcctataaggagttcagcagttcaggaattgaaggggagccatggagtcagtggaataataacacagttgacttttctatatgaaggagtaaaacttaatgctatggggctggtaaaaaagaggaaacacacacacacacacatacacccctccaacatgtcaggatctcacctagggtgctggtgaatggcaagccttcagcaagtcagagaaactgaagaggagacagagagtaggtgacctactggacagacagacacacaggacatttctgagggccaaagtttagtccttcttttttattattcttactgttgcaagtcctactgttattctttttctattctgttcttctcccctgatgtttcccttcttcctctttcctgataatgtcattctaacttctttacttattctcttacagtttatacacccagtaaaatctttcaagcaatataaaaattataatgtagttatattctatatttaagtgaatgattaaaataaatataagtaaaaatcacatttcccatttccgtggcatgattaaagattttacatattatagatgaaaaacaagttattcccaagaacccacataaattcatgaccacgaaacttactatcggttaacaaagtataaacaagcaaggtatttttctcagccagttcttctactggcagacagtactttgtggttacaaagaaaggaccaaaaattttattattatttcaaatggtaatcttataaaaatgttaaaagaatcactaatctaaacttctgtggatgaaaagtcatttctaccttaagatctcaggatgcaaactcattcatcaacagtattattattattattattattattattattattattatatcatatcaggaagctggagcagaaatgggtataagggattaatcatctcctttgatcaccagcccatcctaacaagaaaggtacatcagccaggagtaaccaggctgccattgtttttgtttcctggccttaatgagtcccttactcaactattaaaagtgacctttataaacttcacatggtttcccaaaacattttatctcaaagcccttaacaaaacatcttaacctaaccttactaacaatctgcatctctaaattctgtccaagggtggtgtttgaatcattaatctcttccagcagcaatgctgaggaaaacttaatcactatcattataagagccagtaatactgtccactgaggagctagaaactccctgagagttttcctacaaatcatagactaggagggttgtgggaaccacaagggcaataagcagagctattctcagtaacagcttgaggttccctggccacttagtcctcagtgctctgcctctccaaggctcacttggacatggctttcctgaccaccatgccatgtcctatgagttccaaaactatttctttgttctgttgcaaggctcctgacaggggcacgttagaaagagaatatattagtgttacggtcctgactactagaaactatggctaacctggtagtattaaaaatatacagtttggggaagatttgggaaagagaacatgtgtgttgcatgaaactctctaagaagtagtaaattttatttcttcttctctcatagaatacatcccaattggaacatcccctcccttccctcctcccaatagtctccacctcccttctctctctgttttgcttcagaaaagagcagatctcccagtggtatcaactgaactcagcatagcaagatacaataagactaggcatgaatattcaaatacaaggcaaccaagtaggacaaaaaaggtgccagcaacagacaaaagagtcagagataccaccactctcacttttagaatccaataaaaaccccaagctaaacaaccacagcatatatgcagagaacctagctcaatctcatgcaagctccatgcttgccacttcagtctctatgatcccctaggagccctgctttgttgattctgtgggcctcattggttaatctaagccatgcttagttgattctgatatccttgatccctctggctcctggaatctttcttctccctcttctttgggacactccaagctctgcataatgtttggctgtgggtctctgtatctactcccatcagctgatgaaggaagcctttctgattatgatttggctaggcaccaatcctatgaatatatcagcatattattaggaatcatttttcattgttttgtgttgggttgtttttggtgtttgtaagtttttgtttggttggtttttgttttgttttgtcagtatgttaggttctaccctaggtcctgagccattcaccttgcagatcctggccatcttggcagtgacaggcatgggcttcctcttgtgctgtggtcctaagtgtagaccagttactggttggcatcccaaaagctcttgagtcagtattgctcctgtacatcatgcaggcagggcaggttgtggctcatagcttttgtgactgggatggtatcccagtcccaccactgggagcccagtctggttacagaaaatggccagttcaggtttcttatactccattcctaggattcctcactaaggacaccctaataagttcaaggaagtttccactgcactaggtttcaacaccgcccccagccttccccaattcctattgtctctctccctgaattttccttccatccctccctctcctacttgatctctcctgttctcatacctacccatagtctacttacatccacccacaaaactaattttatttctccttctgagagagattcccccttagaattctctttgttacttagagtctctggatctatgaactgtatcatgatttttctttacttaacaggtaatatctacttataagtaagtacataccatgcttgccttctgggtttgggttgcctcagtcagaatgagtttttctagttctattcatttgcatgaaaaattcatgttgtcatttttttctgacagccaagtaatactctattgtacaaatgtaccacatatttttatccacctatcagtagagagacatcaaggttgtttccagtttttgactattttgaataaagccactatgaacacagttgagcaagtgttcttgttgtaggatgggtcatcttttgtgtatatgcccaagagtggtacagctggatcatgaggtagattgattcccatttctgagaaatgaccaagaaaaagaatatgtagttcaaaccagggattaaggaaaaaaaacactagttacttttttggctttcatatgtatatatgtgtatgttcccataaatgtatatatatgtatatacatatacgtgtgcgtgtgcgtgtgcgtgcgtgcgtgcgtgcgtgcgtgcgtgcgtgcgtgcgtgtgtgtgtgtgtgtgtgtgtgtgtgtgtgtgtgcacgtgcacgtgcactcacatgtgcaggtacttataaatgtgtttgtgcagacaagaggtttacatttggtgtcttcctcaatcacttttcactttacttaccaagaccaaaactctggctgactttatagattactaatttggatggatagctagccagaagtctctgtcttcacccccttttctctgggatgacaagaaggtgtccaaacctacctgcctttatgtgaattctggggatctgaactttggtcttcatctttccatatctagcactttactcatggagctgtctcctcacatcaagacattgttgatgagtgatccacaaggaaagtaaatgtcattcagactccaggttacttttcctagtctaagtatgtgagattttatatcattcagtcaaagtgatacacattagacagggcaagactgaattttctcatcttgttatagcaaaaaatttctagagtcttgaaagctgtgctggaaaagctaacatgtatttggaaagaataatcccatctggaaattatagctattcaggacacaattaaatttagatctataactgttgtttatgttctgcacaccacaggggtttgacaactggaaatacacattttccaacccttgcaactatgaacttaaataagtggcacattttacaacactcgttttagtgcactacacaaagatatgctaccacaatgacattgggcaagcatctgtgaaatacagtattactatatcttttgtctattttgtcaggggcatagtccactcgtttacacataggaatagaaaaactctttagatttcctttcttcccattttaatgaatcatagtaatagtaaaatatttatatctattgctaagaaacttcttgggatgcacagccataacttcagctcagttatactggagaccagatcttttcttttataattaagtgtttaaaattagtcaaaagcgaactgttctaaagtgtgaaacacatcagaaagtaaaagctgttttctggtgttcacaggtcacctagactgatacacacaaaggtccccactatcaagcttgtttctgttcatatcagtaagttgttttccagactgacagtgtagccaatcaccaaacctcataggccagggatacatgtctctatggctacagaagtagtaaccacaacaggaagcacaagacgatgataacaaactttcagagagcatcctacattgctattgagcattaatgaccattcttcacttgaagactcggcgtgattcactcttttgatttccatatgaactctgattactgactcttggcttttgtctctgatcatcctccatccttcttccatgtcttcatattccccagccatgtatgtttgaatgtccaattccatacaatgaatgtgtcattttcataacattcattttgctcttgcttccctgaatgaacaatattattctcattttattttcaataaaactggcattcacagggttcctatcttatcaagaactggctaaagcattgatgattgaaatatctttgagtgagatatgaaatctttaattgtggttaaatagtgactatattgttaaatgggcaacttcaatgaaaaattcatcttaaaattaaaagacattggtagtttaaaacttatccaatcctaataagcaaaatcacctttccttgctcctagccacactcatggaaggtgagtcagcttccaacgtccaccaggctatgacttttcagagtacaaagtagtgaccgtaaactggagcctgcttttactgctataacaactcactattttatctgcatctgttatgaagaaaaatatattaccatagatcttttaaacccagaccagacatttgaactgtcattttcacctctgatttccatcaaggttcataaagcttttaaaggcactcagtaatgtatcctgtatatcaagatccacaaaaggcaccgtttctgttctacaggggtgagaggcagagagccggactctttgtagtccacaaccagggagttcaaaagcaccaacaaaggacttttatgcagccaaggacttttttctatgacttttattctgtgcaaaatgtattcagccaagaaagaatgggaaatgtggtcttaaaataatttctgtggcagaaactggatttcaaatgatataatgaactaatgtgcaggagaggaaaggaaataattagctcaaacaatacatttgatggagttagcaaaaaataattgatatatattctatgtggctcttataaaaggactatatgggtaaatgaacagtcttgatagctttatttcaaaatgtaggtgcatgttaaataccagtctaacatttgatatatagtctagattagaattcatatacttttttctctttataagcccaagattatattttttctatgtttttaatttaaattagaaacatttgttttacatgttgttcccagttccctcttcttcccctctttccctgccccccactaatcccctctctgctcccgttattttttcatagcagaatttccattttccatttagaactgtaattgtaagacacagatcttcatgattttatataaatgccaacagaatttatacaatatgaaagtaatgaaactgtaggactgtaacaaaactgaaatctataaagcactgtaacaaaagtttaataatatactaagaattgaaaaaataagaaatggtttatctgctttgtaaaaaaatgtaagtgggagttaatcgctgctatgctggtagacacctgaaattctcgaattcgagagatagaagtgtcagtagcagaagttaaagggcattgtgggtcacaggagatgctgtctcaaaattagcagctaatttggacacagttaaccaaacttcagctcattaatttggttgggcatacaattgggttgatcagcccataccacaacacagactatttctttgaactacagtgagttagttgaagacatcagaaactgcagatttctattatgggcctacaaataatcatttcctatattgaatgttctttacactccatcaagtagctttgagttcctacttaagtaacagatgaaagttacaaaagaaaatacagcaaagtacacagtaagtaaaacatgaagtaattggattttgcctccagtgtccatcaatttacccttacatttgggaaaagttagagtcctcatagttaagaattcagggtgattggtatatgggatgaaacaaccagctattagtggttttaagtgctttgagataccctactgtagtcttgcagaagtgagaaatgagaaggtttgcactggcatttaggtttctacattacatgtttagagagtcatacagatatcagaatatacttttggatttttgaggcatcttattatggatagtcagtttatgataaataagtggattttattcacacttaaaatatttgagagttaaacatgttaaatgaaagtgaattaaattgaaaaaaaaaggctacttagagcaggatgagagataccatattagagggaggcattatagatccgaggagcgatctggcactagggagatttccagagacctacaaggatgacaggaactgacaatctatgcaatggtggagaggataagctaaatgcccttcccctataatgaaacttatgactattttttgtgccatcctagagccctcatctagtggctgatggaagtagaggcagacacccacagatatacactgaactgaactctggaacttagttgcagagagggaggaatgaagatcaaaggggtcgggaccaggctggtgaaacccatagaaacagctggtctgggggagcacatggaccccagactgctgtctgtgaggccagtacagaactgatcctgaaccctgaacatggatgtcaattaggaggcctccacactctaggaggcccctggtagtggataagtatttttccctgatgtaagaagggactttgagatcccatcccacgtgaagggatgcaccctcggcctggacacatgaggggtggagggggggctaggcccagcctaggatgatgtggtggactttggagagcccccatcgaaggctgtaccctgcctggggaggggagggtgggtgggtaggttgggggaggggtgaggggaggagagggagagggagaagggattgacatgtgaaacaagcttgttcctaatttgaactaataaaaaatttacaaaaaatgaaataatttgtaaagaattttggaacattttgcaacaatattaccagtagaaaaagcgggttgaagggcacaaagaactgatgcagttagtactcatgagtcttcagcaatttaattttatgaactttattataaaatgcttgtaaataatacaaaaattgaacaccaaaattaatcagaaccaatgtctataaaaactcaatgaacttaggatgcagttagaatagatattaaagttttagtcattaaactattaaagaatacaagttttgaagatgggaattcacagtgaatcatttaaaagctttttatttatttatttaatttatttatttatttggtttttcgagacagagtttctctgtgtagctttgggtcccatcctggcactcactctggagaccaggctggcctccatatctgcctgcctctgcctcccgagtgctgggattaaaggtgtgtgccaccaacgcctggctttaaagactattttaactttttttttttaaacaacaacatagtgctctgttcaggtctttgctaattgaaatgccattcattaattgaaatacaatttattctctaatgttgatcatactatatatgtggaaatgagttctatttttagtggaactgtccctattcatcaggattagcataatgatgtacagaagttaaatgaaaaactaaatgcaaaagttagaatgaaagtgaattctgggtattctactaaaacaaaaactataataaaagttttcttagatgcttagtttagtgaaactaagaatacagatagaatacaatataaaataaatatatactaagaaattgtaaaaatatttataaacacaaaagtttaaatacatctatatcaagaaatatgtgtctatcctgagacttaccactgattctcactgaaacttgtgttgtcctgcattagtgtttcttaccaggaaactctacccagactttttttgtacataagcagagtgatgaataaaatgatgcatgcttataattcagtcatcaagaagcgaagactcaacattcattcaacttatcatatctctctctctctctctctctctctctctctctctctctctctctctctctctctctccatgacttttgtgaatctgactctagagccatagagaaatgtggcatggcctgctttatcagccatctatgaatgaccttaacttttttgttactagtgtaaaacatccctttactaacttggcactaaatctggaagacttgacaatgttaaggtactaaaatgtgctaaccttcatcctaggaatctcaatacttctctgttttgttggtatgagaatggaattattatgtgtttgctaaaatggtaatcttattggattctttcttttgtttttgtctttaaaaagcatctttgttttgttgattcattattactttatttagtaatacaggtatattgtatcaactcctaggtattatcattatttatttataaatatattgtagttttcatatattgatcatactctttcctctcccctcaagtctcccaaatcttccttcctcaactccctatccacccaatttcttgtgtgctctctctgtctctctgtctctctctgtctctgtctctctgtgtgtgtgtctctctctctctctctctctctttctctctctctctccctctccacaggacaaaaatcatgatgtatcccaaaactgaaacaaaatatacaaaaactaccaaaacaaaactaataaaaagctcacaaaatcaaagtgttttgtgtttatcaactatcaactacttctgggcatgtacctgccttggagtgtgactaatataaacaggggcactccatggaagaaaactgatttttcccctttccattaaagtatcagttacaaagggctacctggttaatggtagaactttgtatctacttttccttttggatgttgggactgtgtggttcaaacttgtgcaggtgttgattatgcttttcacagtcttggtgaggtcatatgtgtacttgtcccattgtgtctggaggatgctgtttccatgtagttatccatcacctatgcctcttataatctgtctatcttctcttctttctgaagagttgcctgaactttgaggggagggattgacaaaaggataccatttattactcagtctcttactctctgcatgttttccagttgtttgtctctgtgttaatccccatcaaattcatgaagaatattctttattaatagttgaatgatacactgatccatagatatagccataagtcattaggggtcatttcgttgctatattcctttagtagaataattgttataggtttgcctggggtccatgacttatcaagtcttagattctaggtcatttttactgtactaggtatgggttccatatcactgagtgaaatttaaatccaatcaaaaagtggtgatggattgaattctttgggacaggaaatgactttatgagcaggacactggtggcacaggctttaagactaatgatttataaatgggacctcacgaagctaaaacgctctgtacagcaaaggactccatcatacaggccaagtggcagcctacagtgtgagaaaagatcttttaaaaagctgtgacccagttttgtgagcatgctatgttctgcaaaagcttaaggttacaataaggatttctttgccttcaatttgtaaatttcttcagtaagcctcaattatggccttaacttggttgcttctccataaacatcagagcatgatccaaaatttatccaaaatttagaattggagcaatctatcaaaacttcaccctagtttcctgttttataatatgagcatttaattggattgaaatctgtcaatcttagtaacttggcatagttgcaattccaggcaaaaatcacagcaaatatgctaatagaaaaaaaccattgtcatttaaaatgcagtgttatagctagtctgaggaattttaaggtctagaccatgtttactgtaaatacaacattagaattatttattttataagaaaattaaagtataatatattttgattctattaaatgtaaatgcagacatttatgctaattatttgaaatagaaaaattaatctcattttcatattttcagcttgatatatttattaagtgaattttatttgaatgtatctgatttttatagatatgttggcttatataaatagatctttctcttaaaatcactaagatttgttacataacaatccctgtaaacttgttctcaatctggactacccatgaagtgggaattcagtcaatgatattgatttaatacagcttacttcatccctgattttgttcataattctctcctttcaaaactgacctcaagctatgacatctttccaggaccatgaaaacatgtataggtaatgacaaataggtatttgttttctgtctgtctgtctgtctgtctgtctgtctgtctgtctatcttcttcatcattgtaatataatatataatataatataatataatatatatatataatctatctatctttttatcatatatctatccatccatctatcctttccatttgttcattaactctttttcattgtgtgtatttgatatacatatgtttgtatgtgtattcatagatatgtttcctgggcatactcatgtggagaccagaggttgactacaggcagcttactatgtctccatccctgttcacaaaatgttccatctatctatctatctatctatctatctatctatctatctatctatctatctatctattaatccttctatctacctacctatctatccacctatcatgcatgtatctttgtgacagtttctcattgaacatggagcaccccattcagatccaatgtctggccaatgagctcatgatatgcatcagtctctgcccttccccagcactggaattaccactatgtttgaattttatgtgtatgccaggcatcaaaaatcatgtcctaatgcttgcatagtaagcacattacctgctgagtcatctcaccaaccctcaaaatagattctccgtagaaatatgttcatctttagtcaaaatatactcttcatttaaacttggaaagtatttaatataatctatttcacatgtttttgttttctatttttggcattctttggatcttcttgtgcacagtttccaatatccttgtatacatttctcttatagtatacagtctcaagtaggcaactgacacttctcctaagatagaactgaattttgcaatctgttttaatgagtaaaagataaaataccagaaggagtcttaacaatatgcctcactatcaatgtgttcctttgttagtggtacatttaggatacgcacttgcctctgtcattcttatgctgaaattcagcaggaaatgatttcacttctaaatatcctttggatttttaaaataataatcacttgtatgtattcattaagtacaacataatgatgtgatagattaatttaatgcatatttttatttattaattcattataaaaagtttattgagttaaggcatttgcttatgaattgtgcagcaattgatatgagaatgaaggtatctttttatagtgatttttaaatgtaaattacaaacaatcttgttatacatgtcaatcccagttccctctccctctcctcctcccctgcacctcaacaaccccctttctgctccacagggagggtgaggctgtccatgtgggaatcttcaaagtctgtcatatcatttggagcagggcctaggccctcttccatgtctaggctgagaaaatacccttctatggggatactacagataaatactgatccactgccagaggctccatagatttcccaggcatcctaactgacatctatgttcagggggtctggatcagtcctgtgctagtttcacaactgtcagtctggggtccatgagctcccccttgttcaggtcagctgtttctgtgggtttctttgtcctgatcttggccctttgttcatcactcctccctctctacaactggattcttggagttcagctcagagtttagctgtgggtgtctacttctgcttccatcaactactggatgagggctctaggatggcatacaaggtggtcatcaatctcattatcagggaaggacatttgaggtagcttctagatgaactattgtttagattgttagttggtgtcaaccttgtagatatctagacatttccctagtgccagatttctctttaaacctataattgcttcctctattctgttatctcttttcttgctctcctctattcttcccctgactcaatcttcctgctctcccatgtcctcctcccccttctcttctccccttctctttcacctaactccctctccccttcccaaatgctcccaattagcacaggagatcttgttcctttccccttcactgggagaccgtttgtctctcttagggtcctccttgtttcctaacttctctggcaatctggataatcttttgctctatgtctaagatccatataggagtgagtacataccatgtttttctttttgtgactgggttacttcactctggatggtttcttctagttccatccatttgcctgtgaatttaaagattctgatgttttgttttttctgcttagtagtaatccattgtgtaaatgtaccacattttctccatccattcttcggttgagaggcatctaggttgcttccaggttctggctattacaaataatgcttctatgaacacaggataacagatgtccctattgtatgaatgtgcatcttttgggtaaatgcctaagagtggaattgctggatcttgtggtagactgattcccattttcttgaagaacctccttactgatttccaaagtggtcatacaagtttgcactcccaacagcagtggaggagtgttttctttctccacatcctctccagcataaactgtcattggtgtttttgattttagccattctgacaggagtaagatggtatctcagagttgtttggatttgcatttccctgatggctaaggatgttgagtactttcttaagtgtctttcagccattttagattcctctattgagaattttctgtttagttctgtaccctactttttagttggattatttggtattttggtgactagtttcttgagttctttgtatattttggaaatcagtcatctatcaaatgtggggttggtgaatatcttttcccattctgtgggctgtcattttgtcttgttgactgtgtcctttgccttacagaagcttcctagtttcaggaggtcccatttgttaagtgtggatcacagtgtctgtgctactggtgatatgttcaggaattagtctcctgtaccaattcgactggcaaatcaaatccaagaacacctcagaaaaatcatccaccatcaccaagtaggcttcatgccagggatacagggatggttcaatatatgaaaatctattaaggtaatccaccttataaacaaactgaaaaaagaaaaacagcatgatcatctcactaaatgatgaaaatcctttgaaaaaactccaatacccctttattataaaggtcttggagagatcagggatgacaggaatatacctaaacataataaaagcaatatacatgaaaccagcagccaacattaaactaaatggagagaaactcaacttgattcctctaaaatcaggaacaacacaagacttccactctctccatttctcttcaatattgtacttgaaattctagctagagcaacaagacaactaaaagagatcaagggggatacaaactggaaaagaagtaatcaaactttcactatttgcagatgatatgatagtctacacaactgaccccaaaaagtttaccagggaacccctacatctgataaacaccttcagcaaagtgtcaagatacaagaataactaaaaaaaagtcagtaaccctagtatatacaggtgataaatgggttgagaaagaaatcagagaaacatcagcctttataattgccacaaacttggggtaaagctaatgaaacaagtgaaagacctatctcacaagaacagtgagtctttaaagaaagaagttaaagaagattccagaaaatggaaggatctcccatgttcttgaataggtaggatcaacatgtaaaaaatgacaatcttgccaaaagcaatctacagattcaatgcaatcccccatcaaaatcccagaacaattcttcaaagaccttgaaagaacaattatcaactttatatggaaaaacaaaagacccaggatagccaaaacaaccctgtacaataaacgaacttctggaggcatcaccatccctgacttcaagctctattatagagctatagtcctgaaatcagcttagtattggcacaaaaatagacagccagatcaatagaatcaaattgaaaaacctgatattaacccacacaattacaatggaaaaaagaaggcatcttcaacaaatggtgctgtcataactggatgctggcatgtagaagaccacagatagatccatatctatcattatgcccaaaacttaatttcaaatgtatcaatgacctcaccgtaaatctaggtacagtgaacctcttagaagataaaggaggtatccttgaatgaaggtatgtttttgacattcaatttcttcatatattggatggaaaacagaataatggtataaaagagaaaggtgtttattgttttcattttataactcagaacccatctcaactattttcttgtctacgaagctttttctgagtccttccttccttctttccttccttccttccttccttccttccttccttccttccttccttccttccttccaattctataattcagtttcctttttctctcagagcacattatatgatacagccatgccactttttcttctttaaatgtagtttgcagcctgaagccaggaagtaggtttactcttctatgtatacctcatatctggatatctactaacatacacacatattttttttattacacagttgaccatttggtgaggggaagcccaccttgactgcttatatcactacattccatttctcatttagcagtgagaatgagacgtcttcctctactgtacttgatttttttcaaataagatttataatttaataacccatgcagcatttctgattacattattgatttccatttcattcacagatgtgtaggtttttgagaggagacagtaggacatgaacataagtatgttatcgagccgggcattggagggaggtacatgccttttatcccagcacttgggaggcagaggcaggtggatctctgtgagtttgaggccagcctggtctacagagtaagttccaggacaacctccaaagttacacagagaaatcctgtctcaaaaatagaaaagacatatcaactcgtatcatcttcatctcctaatgggagtcaatatgcatacacataagattaattgtttcatacactgatctctccttgtcacattaaaaacaatgctgtctcatattttctatgtactaagtcaatccataggttcagttcttcagtacatcaatttctgtcatctctgtgctgtacgtggacatatgtgtcttctgaggcatgctttttatttttccatcaactgcaaaatttctggtgcttaccataggtgccatctgtattttagtgagttgctgagatcaaatacaatgccagtcttttgctttacatgtgttatctgaaaaagtacatctctgttaattctacctaaatacttggtaaaaagataatataaagatactgtaaaattcttaaccattcttattttgccagagtctgtttcttacctgtttgtggtatttttttcaaagtcatggtgagaggactctagaacaaaacttaactgtgtttcgaagctccacaaactcacatctttcactgttatgtaaaatttgtcccaacattctgcccagcaagattgcaatcattaacaatatattcctctcaactattgccacaaagctattattcagccagggtaacaaccgagttaatttttggagagagctgttcagagaggccaagaagtgcagcatttatcagcaccgccttttctcctatttctaattagtgtggaaagcttccaaacaggagtcagcccctcagaagtctgtgctgcacaaagcagggcttgttaacagacacaggaaacaattttattttccagaataaacaactgcgtcacacagccttttcagaagcggcgcaatcttatttactacactccttaactgttgaatgctgtttatatgcttccgtgctttttcattaaaacttaaaaagcctattactctgactcaatatagatgataataggttcataatgttccctgcagcaggactgtagacttccctagtgatacatttacttttctattatttatttttataaatttccttttacttttttgtttgttttttatgcatgattgctcctttaaatttcacaacctactttcaaaaattttgtaatctgtagttttaatgctgtcaaaatctgttcactatctttcccataaaatacagtttatgttgtatttctttttccttccagtcaaaaatcccttgcctaaatttctggttattcagacacataagcacttacagtgagcaaacgtagctcaccactgaatatcttgtgaccagtccaatgaattagacaagtgtatctatcttatctcaactatcttccagctttcattcccagtagtcatcatatattagcctggacactggactgggcactgggtattttgtcaaagcacagaggtcttcatcttggatttttctcaagttacttagtaataatgcataaatttatgaaaaatgctatttctaattggggaaatgaaatatgtcctaagtttcttatatccttctcaaacgtatctgatactttagagcgtagtgttgaacaaatactttatgacaatatttctctcctcatacagagtattatgaaaagatagtgtcatttcaatgaatgctgcagaaatattctgaaatgaagtcatagtggtattattacattatgattaatttcttgtcatgaaatgtcactcactcctgggatttcaggtagaaggatcagagaggcaagacaagcacaatctctgttaccttgatgttgacattgtgtattttcacttagacaagaattagaaaatttcattttgaatgtatttttatactaaaatttgtaaaggtaattttataaccaataaaatggtaacatctatgtagtgtaagatccactgagatctcccatgtaaaagaaaacttaccagacagaatgttcttttagaaagccagatgaaaataaacagtgagatgccagtgagcaagtctgatctgatacagtcttctctcttctgcctttgtaggtgatccttgatgataaacttgctctttctctgtcttcacaaacactattaagatcttcttgccacatattcacaaaaactaaggaaaaaatagagagatatacatattagtcactggttaaagatacatttaaaaactgttatacaaatacatacacattatgatttaaatgtttataattgtctcctatttatattcagtgcatagttcattatcctgtttgtcatgtttatgcactaaggaaaaacaaaatcctactgaaagaacaaagtatagccagggcaatcctgagacctttttgtaattgatgccactgtttgtagttgttcagttgtttccaataacagaacctcagttactaaagcatcttgttttcctgatgctgaaatctaagtaacttcatcactgcactcagacatctgccagagaagttcttcccattacaaggtcacattatgtaaatagatactttcttcagaatgaaagcacaaatttcatacatcacgaattttaatgtgttctaaaactatgaaagataaaccccacattctgtccaaatgctaagatctcctatatctgcatgatattgctatctccacctatgtcagttaattctgacttcacctaaataatcagttggggatcccctgttatttagttcttgaatactcttgcttctgtgactatgtatgtccaaatatctctatgtgaatacgcattgtgttttagtcaggaaggaaaacttgcctatttttagtttcctttgcccttgtggatgcttattatttcttaattactaaaaatcaatatgcaaaagagaaaggaaacagagatctaggttaattaaccatttcttttcaaaatccatgttacagtgaatgaagagttacaactaagcaaccatacagattttacaaagttagtattttccactgtctgattttacttgcaaattatcaagcttggttattggcactgtgcagttgatgcgtcaaacatcattttccatgaacacaacacacattgtttgcatgttatcaatttattagctctggaatttatcacaagtgatcacaatctggttttaatattgaaaatgattaaaagaacaagtaatttgtcattccttttacttcggtggggcattttggtaatgtgaaagcattaattcatttaaattccacattaaaagggcaatcccaggtgaaagccaagcactgtgtatctttaacattgtcacagaggaggggtcatagatgaaagagatacagcgagaatgcaccagctaatactcctccctgtaccgtaggattcccttacctgtagttagcctaattaaaccggataagggactgctcttaattggctccctgctctattaagtaatgcagatttttttttcctggttgtataaggtatttctttggccacactctatgtacgtggaaactgtatttttctacatttctatttccatgcttttgtttatctgtaccccttgaaattataaacaactttattatgttctgctttagataattattcagataaagttttcacaaataactaacaatggaatatcaatgttacttggagtaatagtttacagcataatggaaaagatattctagcaattgaaatcaatatttgagcctctacaatacgtcagggttgctattaaatgctttatttgatatttcttgttgactgtttaaaactccaaaagaaaatctcgttgttctccattttttgaaaacattttctttaaaaaagatatatagcttctgggtaataaattactacaataaggaatatggcctcagacaaatacaaaagaattcataacagagataagctcaacatattatttccacattttcattttttacccatagcttataatgctcagatcaacaaatagtatgacttcactttttgtagtccagatgatgactaaggttagattattttaaattaatagacaattaaatgatctacatcatttattctggatataatttcaagatgatttcttattcaaggacaatagtggtatcgtagaggagaactagcattatgatggaaataccctgtgctgtggtgtattggatctttccaattgcttatgatataagaaaagttaattcaagtgatagcaaggacaatgaaaatgaccaatgatacactaaataccttcttcaaaaatattgttttgtttttttatttttgctttttatttacccatagatcatatctgccaaggaaaatttgctgcaacgtgtttacataaatgtgcatatttttggaagttaaaacattgcaattataggttaaattattagtgtctggtgtccttgtcttagggtttcaattgctgtaaagagaccatgaccactggcaactctcataaaggaaaatatttaattggaatggcttacaatttcagaagtttagtccattatctccatggtaggacatggcggtgagtaggcagacatttaagaagctgtgagtggaggagatacattttcgtcctacagggaataggaagtgatctgagacactgagaatggcttcaacacatatgagatgtcaccacccccatacacaacaacacacttcctccaataaagccacaactccttatagtgccactcccccaccagcttatgggtaccaattacattccaactaccacagtccctttcatctttttctctttcttataagatttaattttattttcaattacctatatgtttatatatacagacatacacagacagatgtgcacacatgagtgcccggacctgaagcagacagaagaggattccctgaaggtgggattacaagtatatgagtcacctgtcttgaggacacaaagcagaacttgagtcttctgcaagcaaagtaaggactcttaactgccagtccatctcatcagccaaacattttatttcttaaaaacacatttgtccacctcctatctaatttttaaatgtgtaatattgctctctctctctgtgttccagtgtgtgtgtgtttgtgtgtgtgtgtgcgtgtgtgtgtctgcagtttcatgaaaggaggtagaggctgtaacaaaggatgggagaaatctaacagctatatatggacacatggaaatcaaataaaacaataaaaccaataaaatcagacctccaaagtgatatgaaagaagtacttgcaaaaaatcaatggaaacaacaaacaaataaacataaaacccagaatttattattttgatctgtctcctcacactatttgataaacccagatttcaaaactctaattattttttatgtaacctgaaaacaatttccttcatttttaaactatgtttttatttattttttgtgtctttcacatcatgtacctagatcccattcatctccctgtcccttagtatcatccctcttcccttgcaaattctcccaaaaaataaaatgaaatttaagaaaaaaggaagcaaaggagggagggagggaagaagagaaagaaggaaggaaggaaaggaggaaaggaaggaaagaaagaaggaaggaaggaaggaaggaaggaaggaaggaaggaaggaaggaagaaaggaagcctcctcatggaagctgtagtgtcacagtgtgtcacacagtttacccttttgtccatttatctctgcttgtaagtgttcattgcaaagagtgggtggattggttggaggtctcctgtttctgctacactattggtactgagacctcactgggactgctcttggatatcctattgtttctctgtgtcttggagttcctgaggctttgggtctgcaggacaagtcccttcatgtgctccagcagatcaaatataagatggatattgggatgggccaactcataaccctagctctgggcctggatacttgcagagttggttggtcagctctctagctttccctggtcctcacaaccagggtgaactctgtcttgtgcccatgcccccagggtgggctctctcacaagtacaccagcaaggtcacatttactgtgtggcacaggcaggaacagctctctagctcttaggacctctggaccagctctcctacctccacaggcatctaggggcagggatagggcatcttttccccactcattcctacatatgacaaataaggggcaggaccagatcccccacaatcaagagaacactttctaacatgccaattattaaattaagggaaagaaggagttatgttttactttgtttctgttagttttattttagtttcctattatcctataggaggtaatcaagtagattcaggttttaagtaacaccagagtcaagttgccttttaaaaacacaccaaataattatgtatattgtatcagttactaaaagctattagtgattgtctctgtatctattgatactggagccaactgataatggtatctgagccatttgcaaagcctttcttcactatttacaatatattttccatataacatactgccattttagcatataatcatatttatattcatctttaaacatttgaagttcaagtaaagcatcttaaaagtcggtattattgtttcatggttactagcaagtcttttgttaaatgtgcgcttccattttattactatgaaatcactattattatttgttaagtttatcaacaaattagaaataataaaaacagaattcagctaaataacatgcctaaagtcacactactaataaatttattcaaacacatcatacttttttgtattatttaggtatcaagctcctttaaacaatcatggtgcaattgtccattggtgtttggggaagatcattttcagaagcccaatagataaacacagatgctcatgtcccttataaaatatacctctacctttccacacatgttaaatcaccctggattctttctaatgcttaatgtaacagaaacatcatttaagcaatttttatattgtgttgtttagtgactaatgtttaagaaaagaaattcccatagttttagaacagatgctgtcaccattgatataatttccttatcagtaggtggctggatatatgcaagactatagtaccttcagacatgaagaacagacttggtataccatcaacacaaaagctttttacaatatatttcactttataattgactgcactttattcctagtttcaagagaaaacaagtagaagtaaaagcacatatggttttgtaatttataaatggccactgctttttctaacaatataattgctatcactataacaacccattatatgcacaaaaaatcactaaagaatatttatcatttattctcctgttcacttttttcctttggatgtgcttagatcttttttttctggctcttttattcaatatttatacagcttatatagttatagagcaaaagtaacacaacaaatacctttttctactgcccataggaaaaagttagtggataataaatctcactgcctccttccagagcttgtatgaagcatctttcagtcatgcatggcagctttaagtgaatatggttagtttcatcctaaactcctattgtctgatgtgttcaccttatcattgaatgtccttctcctgggaggtcagttcacatttcttctctctacaactcgtgggtgttgtttgcttgcccttccaatttacagtattctttttcatttattcattcctattctgaaccaaacatcatatctcattcaattctcataagaattttgaaacatttattctggagtgcttccaatttatctcattaaattgattaaattaaactcacatccagccctaaacatagcatgactcttttcccttatttcaggttttgatagaccaagagcctgaataatcaaatgagaatttaggaataacattgacatccatccttcaaatttacacccaatgtatgttcaagtgctaagtcggacatcaccatctgacacacaaatgactcaccttataccttttctattgaaagaatttctatgtatgaagagactgccaccaatggtctgcttaaacaacttaccttcacaatcttagtttctggagatgagaagttctgatgaccttgctctttgcctcatgggcttttaccaagctgttggacagggtgctttctggtgtggatctcagattttcattcaattttactcagattattggacaaattcagcatttaaaggtaagggtttttattctcctcctctgaacccatgtagccttccttgaatatcattcatgtgtcatctctactagagaggaagggctctcaattatttggctcacaattacagcatgtttagttcatgctcacttgatcccattgctctgagcctgtggctacagagtacattatggctgaaggaatacatcttatctcatgtaccaggtatcgaagaaagtagggaaaagagtcccaatgcccctttcatgggatgtctgcatgacataactccctccaatgagtcccgcctcctaaatattccactatttctccaaattgtcaaaagctttggactgagattttaacttgagccaaacaaggatgtttattcaaatgatagcaggggtcatcttagaatcctcaatatcaggattaccagagaataccaaagttaaccggcacacttcaccactccattctcaatggaaggggctttctcacatatgacattgatcattttctccggtaaattaaccttcatttctgtttctcatcacggtggaaatgacaaaaggactatgagcacagcagtggctgagccctcactaaatctccagttatattctccactagattctctttacttagcatttcaattaacgtggttttctattggtctcttttatttgtcatgctccttcttgccccggggatgcagtggaatcagatttgtctgtctggacctttcttccctgcctttttaaatagcaattacagcatgtgctccagatcttagatgaagtatcactttcaagactgacttccccttttatggacatactttgcactatataattttttcatagcactttcaaggctgaaatttctttgtgttgtgaagtaaatatttcagtcttctccaccaagctgcttaaagaagaggccaatttgagtttttactcccttgtgtatacccagtgctaggacaagtagctagcataaactcaaggaacatatgctctctgactaaaaccatttaggtttctgaagtgatactactcgccatgcttttgtaaagaaatgtaatctttaaatataattaatcatgcctatgcatatttacaatttgtttgaagcaataattattaattttcatctgtacatataggagtattgtgaaaataacagtgtttgaaaattggccactcagagagatcaaggctcaaattcaggacattttagattgatttgcttaatcttttatatttatatgggacagaatcatttaaaaacatagtaaagtactttctgagatgttgtacctgttgagcttcataaagagctctgttttgacatactgtgaaaatctgaaatccatgtaagcattaaaaattgcaaatgaaaaaatatttcactgtggggcaaaatcctgaagactggatttcaggtctcatcatctgaagcccaatatcatttaggacagagacaggaggacttctgaggcttctatctttcatctctgatatatatatatatatatatatatatatatatatatattatatattcttaaaaggcacaaaataactttaaacagtagaaattttcttagttaaaaaaatgcacaactgggcactttttgagagtaagacaagatgaggcactcaaacctgaatgttacatatatatcataattctctgggctaagaagtcaacacagaaaagaaaggaagatttactagccagaggtggtggctctgcctacatgcacaagttatgcataagatcaagccagacagcatggcatgaaagacagcaataaagttcccctccacacacatagttgagaagttattggtgattaatggctattttcttcaggaaagtgaccctgggagtgtagagctcagaaaaatgggtctacactaaccgatacattgacagcactaagtagactcactgggtttataatcagatatgagattggaaggaaatggtgatgataagagacaagacaataattggaggaatggtggatggatttaaccaaaacacattatacacattcatgaagtttcgtaaaataataaaggttttattttacttttaaaatattattttacccgggcgttggtgctgcacacctttaatcccagcactcgggaggcagaggcacgtggatctctgtgagtttgaggccagcctggtctccagagcaggtgccaggataggctccaaagctacacagagaaaccctgtctctaaaaaccaaaataaataaataaataaataaataaataaataaataaataaataaataaaatatgaatttattttttaacttattttgaacaatttagtatctaaatactatcttatctccatcccacccctgtcaatcacttatcatctaggcaaggtcctttcatgtattcatgtctttttttgtttgttttgtgtcccacttagtttaaccagaggaatctgcatgagagtggatgtagaactattattgcagtttgatgcagtcacctgtagtgacataaatgaaaaaaaaatgacactcccatccccagcataaatatatagccatttgttcatgagaaatagccaaagccctgtgagcttatcaccatccatgcctgaaggttaataagcccagtcttatacaggtttagtgcaggcatttgcagcttccctgagttctgatttctgtggctatgtgactaaccatattattactagactacttacaacaattgcacagttaggtatctgtctgtttgtctgaaggatacatatgagagattgtttcttagaaaataatttctagaactgtataataattgtctcaaaaagagcaacattcttatgatatgtcaagttcaaagttcaaaattatttctggggaaatactactaggtatgtgacaatatttagtatcaacacagcttcctgatgtgttagtccttagtaattatggtttttctttataattattttattatcttaatgtgcagcatctttacttttcatatagttttttcggttttcttctgataatagctggcatgtcttattcctatcacttacttttatcctatttatgtcttttgtttgaaggcttcattacagataaagtatagatggtccttgtttcatgaaatctaccacactgggcaaataatattgtttaagctatgtatatttaatgcaattagtaatattagatttaaaaccaccattttatagcttttttctacttaatattttgtctgtttccttttccttcctttttgagcattttaaatatctcattttatgttttatcttcatgatcatcttaacacctttatgtctttttagatacttcatggttgctcacaagtttacaacatacaactatagcttgttaaaggcaatcttcaaatagtttttccaattgacataatatataacagtctgacaaaaatttagtgtcttgcttcttaatcatttttatggtcatgaatttttaatgcattataaaattgggtaattttcatttgtgaagatagaacaattttggttatttttatttgtttacaaacattgcattcaatatttattgcacagataaaaatttctgaagggtaaactactgtctgcctgccaaattttacatgatatttcttataatgaaggtccatcattaattgctttgctcgatttttgtttgactataaaagtttttggacaagcctgatgatgcatctcttcaatcacagctactacacagaggctaaggaagaaggattacagaatcaaggacatcttagcctacagggttaattcaaggatagcctaggcagctgagatgagatcttctctcaaaattaaaatagacaaataagtaaatgcaaaaaaacaagagctggtgattcatgatagtggtagaactcaaagaccccgaacaagttaagttctcagcattgaaaaaaaaaaaaggtctttttcaaatcaaatttactttttatgtaaacagatgttgagaaacatgtttctgcagctggttaaacttgtagcccagattcatctctagtctcccctgattttcttgtgcttcatcatcctagaaatcttgcctattgctttccctgtttgtactcatagattgattgaacaatcataaagaatctcagatttatctgtttaagcacttgacctccttctcgttccccctcccctgtggccacatggcaatgtcttaaataatatttaagtaaagatattgttagaaatggctccccctgaaggggagccctttaacagaagccctggtctttgctaacataggatatcccaaataaaaagctgatagtgtaagtcagaatttgctgtatgtagagatacctactgggtcggcacagacctaactactcttgaagacttcacttcagaaagaaacatattttctaaaattgactggattgtattttattttggagagtttttattttgagagacaattagaattgaaacagtcttcttcagtcatttttgaaagtcaattctaaatattcatgattcttagaaactcttccaaaggcctcacaggtacttgcaagtttacactaaatattttccttcaagaggccagtgccaaacagtcctcacatgttaccaaaactatgtgtttcaaagaacagctaccatgagaaaaacattcttaaatatacatataagtaacagcaaatgaactcaggaggttatatttatatatttatgtgtctatatgcatttatataaaataattaagaggctaaaaatacaaatgaaactgaaacttgtaatcaaagaaaaaattgttttaaaagagtattttaaagaatactaaacctgagctaaagttaaaaattagctcaaaacttaagttaaactcaaacctttggagcaaatatgcatgtacatattcacatacacatttgtacacacacatacttgtgcttaggaagacatcaaattaatgtaatacatatctttttgttttcattggcatttgtggcaaaaacacatgaataaacacatattttttgacattaaattaaagtagcttatatttcaaatgccatagaattgtaagtcataccacaggatctttttgttttctaatattgatcctgaatttctttttttcttaatatgcacatgcagcctacatcaaagcttctttacaaagaaaacatgattatgtgaaacatgatcatgtattgagcatgggctctgtctgtaggattttgtgccatgcctctcacataagtatgttgctgagtggtgctatagctggtctagaggaatagggaaatacagataactgccattacttctcatttctgaatttgatgacttcatcctgttggtttgcctctgccctcacaagtgctatgactacaggtttgtcagcacacctagctgcattagatttctatgagctgtgcatagtttcaatgggctttgaagtctagataattcgatgtgaaatgttttagacatgaaatgtggagaaaagcaacatataaaaccaacaacagattctcaaagtattttaaaaaaaaaagctatccctctcaccctgaattttgcaaatgaatacacaagtttctgctttggatggatatagtgatgccattattgataggatatttctgtgactgaatcactgtcagggctagttagcaaacatggggtaaaagtaacagcttatatgataagcacagagtagtcaaaaaaaaaaaaaactagtttggatgaaattcattccatgatacagaattagaaaatggcatctaaagatcaatgtcccaggatctaaatcaacaaatggtgtcactgccttttgtggtactttttgttgaattcattcattattgcacaaatcataatttaggtaaacatataaaagatttgataaagattatctactattagaaagtagcttacagggttgatattttaataaaaataaattatcactaagaaatctaagtccccatggggagttggcacacacctttaattccagaactcaggaggcaaaggcaggcagatctctgtgaatttgagaccagcctggtctacagagcaagttccaggacacccaaggccacatagagaaaccctgtctcaaaaaaagcaaaaagcaaaaaacaaaaaaaggaaaaggaaagaaatctaagtctagtattcacaggaatgaataccacactcctaataaaattttgactctacttccagtgacaattgttcattattttgtgacaacttatgttgaaggccaagtatcaaacatttattgctttctacccttaagtattggagtctctaaagtatcaagtacaataaaaagtcttcatacccattgaaacatatgagttggttttctttttttaaaatctaccgtagaatttaaattctatcataggctgacagcatttagagatttgtatattcttaagtgaagtgattattgaaaaaataggcaatagaactcacaaaatatttttttttggattcaagatagttaaacaatttgtgtgcctttattacaaactagccacaaccatgtttacacagactttactgagtatgagtatggtaaaggctcatcaacccaagcctccaacacagtgtaatcctattgtcatctccacaccataaaagcataggatgaccaaaacaatagtttccttattcatattcgtctatggagttcttatgaaaatatctgcattttctttaaaataactcagtctccacagatggatgcagatatacctcacatagaagctcatcagctctacctaacacttccaaaaggagcaactgtgaataagcgtacacaatcatctttttgtattgtttcaggagagtggcacttatagaggaaatgccacagataagcatatttccaggatatgaatacacacaccctcccagtgactgtgagggaagttttaattcccaccacataatggtccatttgcctggagtgtttcagaatggttcaataatcaccagccatgtgtgtagtttgttgaattatttaagcttatttccagggggaaaaaaagacagggaggaaagcaactgattcaatgcaaatgaaaagctttcgaagctccctatggtgaagatgtgattacagtcagacagttaataacctagacttagaaaaatctgaaggttttaaaactgtctggccagtcagtaaatgaggtttttccacactatcgaccaactgccatgcgctgtaatggcttcagatctgtttggagttggagtggacccacaaatgaagcaagaataccaccctctgtacttttgacgattaagaaagtagtttgtaaacctcagtggttttctttggatttgggattgagtctgcagcacacactgtttatagggacaggcagtgagcactgttttctgaaaacgagcagagagaacttctgttgttgaattttaaagcatgtctctatgatttagagttcttaaagtgaccatcaatagttacctctggacactataaatgtgttagaacagaaaaaatctgatctgaggagaactaagttctctgaggagaactaagcaatagcattattattattattattattattattattattattattattattattattattttggtggttaaggatggattaattttaggtcagaatttggaaactcaaaatttattgacaagtattaaaatattcaaagaataataaaatccagagataaggttgcttttagtcactagcccagatacatttatccattagtaagatgtttttactttttaaaatgttcatttaaaatctgtggagtataaattttgtgtaaaagtctttgctaaaatttatttagtaactaggcaggttgacttgctgaaaattgcatagtgaccaagaaacactttttatgaaaacctatattatttttatcaaatccttgataaagtatgagacaagctctgaggatgaagttttctttttaaagcttcaaatattttcaagtcttttcctgaaattgtgttatattatacattttacttttgccatagagaagtcgggagaaagtagtattaaatatattagtttacaggtattttgatgccattctgtagccaatttcttattgcaattataatagattttaaaactacccaggactctgtctcaaggccaatggcagtgtgctagaattcaacttcagaaatgtgtgtgtgtgtgtgtgtgtgtgtgtgtgtgtgtgtgtgtgtgtgtgtgtgtgtgcctgagtgcacactcttgcctgtgtgtgggtgtctgtgtgtacatttgtgttttctttcatttgaagaagaacaacgaaaaatgatggggacaaatagaggttatttttcttatcatttgtgagaaatttcttgcctccaggcctgagctgagttttcttctacatcagtgaatctgtacaatttactcagtctttgaaaaaaaacaaaacaaaaaaaaactccatcattcacttgattttttgacttgtaaaaatttaccaatcatgcaaaaactcattaatgtggaaaaataatagtttatatggaagtacagtgcttttaagtattttatttcaccaccccaatcagattaaatgatagtgacgtctgtagattaaaagtccagccattcaaaatgttttgtgatttctcaatcattgataaatttgacaccttgattttagcttgcaatcattactttatgctgcactatatcatgaaaacacctaattcctttgtatgaataaagatttagtattaaacattatatagtataaagacagttactttgatcacatttcttttatttactttgttccctttctttaaacatcttttgcaaagcaggcagaggaaggagatatcatcaccaagaactacgtgagttttaatttagtttatattcactacattaaaattaaaatttcagtgggttttactttatttcttattttataagaaataaagtgttctttatttcttattttataagaaataaagtgtttggtttgggaaaatgtattaattataatataggtgtcataaggagaaaatgatcctttgcattgaaaggcacaattgaaaatgtaagtttacttttatctttttagcatattctagtgcccttttaacatttctttctatccataaacttgatagcagagtccagtagcttaactgccataaaaattgaaatagttaccattagtagtcactgattctgtttgaaacttccataaaaatagcttcttctatcccatttttatcagtattggaaatatataaatataattttatgtgtttatataatgcatatttaaaagtgtattggaaaaactggtaattcactaaagtactgcagtcaactctacagtaatataatatgttatagcaaattagtaataataatcacattgatgacttgaaaataaagacttgttctaaacaaatcagaagttcacgtgaagaagtccttggaaaaaatgcatttctctgtatatgtggaatatcaccaaaatcaacattaaacttgaggatttaactttggaaaaattccaaaggaaaattttaacattgcacaatttagatatttgtaggatagattgatggatgttttgatgaacacattgacagatactcagatgatagactgactgacaaataaattacaagattattgctcaggaaaaacatgatgtataataaaatcagtgtagcacttacatatttactatttttaagtaaatttaaaatatgctaccttttaaggaatcacaattgctcaaagttctatatttgggaatgtaagaatctaactaaatgaaagaaaattgcttataattactagagtctcatatatttgaacacagttatatgaactatgtagcaaacttctttttatgagttttggaacaaatataatatttcttcaaagttaatatgtgttcatttatgaaatgttggttgaataattcccacaggatataaactatttttgatacagcacattaatgaattacataacagatgagtagtattaaaatatgtaaacagcaaattatatagtcttattatatatttatcatgtggactgatccatgcttataatgcaatgaactcagtatttttccattgactatgaaccttttaatttgatataattaaatttaatttaatctttaatggtcacttattaatttacttttgtttctccaataaaataaatcaatggaaaacattttagttaattgcaacttaatttaaggtttaataataaaggcaggtttgcgttactccttctttgtggattttagggttccacatctttggtagtgccaaatgtctttcaagaacagagattgctgacaaatacacactccagaatatttggagaacgattataacccaaaaaaaatagaaatggtatattactggcttaaaagtagagctgtgaatgggggagtagaacattttactaaaatctagagacatgatgaactcaatataaagaataatcaaaaaatttgcatgctaaaccagcaagaagtgagcctgaggaattctattgtaggattttgcctagcattccatatttaaaagaatgaagaacaattctgtatttgagaaaatgaaacagaagcccgcatgctttgagtattaaaacggatcatttgccttgttcgtttgggaaagtccctatcaataacaggtgtggcttaaccacatcacattaaagggccaagatgttcattaataaagaaaggaagagtctagaactgtaaatcaacagggcctcctggggagttatatattaggcagtaattaaataatagttcgtgttgctttctttcactgggaattacatcttttccccctcttctctgctaaagcagagacatccattacggtgagtagctacacttgtcagaaccaatcagccccacggagctgaagaacaactgaagtgtactctttgaaagcagggcttcttctccccccaaagcccactgtcctttcacgtgcatgcaacagtcaaaagggatcacatcacctaatgaagaaaaacagaagcatatggtagtgaggggccccagcaggagatggctgaaatgccaaagcttgcacataaacaaaatatacacaaacatgagtgttcatagactctgttggccagagcttcaggaaataataaggctacaaaggagaacagagtgtactgtgaccacagtttcctagcactccatatttttagcttaatgttttattactttataaagtagtgaaccagggcaggctagtcccaggtagttaattatgcataagcagtaacaaaattcgaccatgctgtataattttgagctacgtattcttcacagtgtgctttgctcatcccctctgcagacttccacctgacagctgacttgcaaactgtaagtgactttggtgctgcctgctttttctccatcccaccgctgggcaagggtggatgctggacgaagttcatcagttcactctgctattcaactgagacgtaagcacacatgtttccagaggtgttgtaataaacattttagatgtgatttggcacatttaccataattgtttcttttaaatttcttttgtgccaagttaatggtcttaatcaaaatcctgtcttcctgaaatggctctgaagcagagacatggccatgctgctatgtttgttatttggcagggaaacccattctccacactttgcaagtaatttggttttgttttggggcaaatctaacatcaccaatttgtttaagcagaacttgaacattcaaaactgtttttctttttgttgtgaacattttagttctctgattataaaaattaggggaggcttgtaaagtcaggactcatagaaggaacctatgtagtttcaaaacacaactacatttaatttatgttctaacatggacaacagactttcttttccaaaaaagctaaactggcccagggtctcctgtcagtggttgtagttaatttttaaaaagtcataataataaataaaaaccttaaatgaaagatgtttttgtttgagtttttaagttcaattttcataatcttctttctaatataactattttcttatctttaattgagtgtcaatgaccctattttatgcaaataaaacataatttttaatttgtttttcttgtaaataatatgaaaacaggtaagatggttttaattcttaaaacagatcttttattataagacagtttggaatatgttgatgtctgggatttagagtctgtctgaaatcaaggacttgatgggttatgagactaaaacctaggaagatttggtttcttgcattgatctgttgcttccctgttttaatataaacaagtgattgacaacaactgtgattaatttgtatcctttggaagggatctgaggccacttggctaattaacctttaacatgactcttagggctctgtgctaacctttgctttgagctaaacaaccagccttaaggtttatagcagcatggtggtacaaaacctctgtagatcatatatttgagacttgctgtctttttttctggtgatttcatcctcaaatttccactttcagtaactgaagaaatctgacaacacacaatgtggtcatttcaactctaataaacaaagacataaattagcacagatggatcaaaacgctagcagagctccactgggtggctgtttcctggttgtggacaatggctttggaagagtttcaagttccccctaaacgtagccactcctcatgacacatttcttctctgtggacaaatataaagatgatcgttgagatattgcttgtaaccatttcccccttcaggtggttaagactgcacttcttggccatgtttgtctcggagttccttttttactagttcagcagcagcaatggtgagccaggctgtagacacactttgattctgcctaagagcttgattccagtggagttgtatttaaattttagaatgaagaatgttgatctatattttcttggccagagaattgtggggagatttgtattgcataattactggaataattgaaaaactaaaaaaaaaatacaggtatttgcattattaatgtggctctttggatcctggtttgataagagctactggacaaatagagtgcagaaaagaataaggagttttgggtgctttcgaacttctattcagttattcagcagtccccatgaataaaacaatggagaaatcatacaatcaccccaaagtgcttatgttcacaaatgtaatcaattccttaatttttttatcattgaatacttgactattggccagaaaatttagaaataccatatcatgggaactgtgtcaacaatatgctcatacactatttaaagaaacaaaaaattgacaaatcttttcataaaaatgcttgcttatagcaccacgaaccttgaattaaaattgaatggctaaatgttatttcctaaacaaatgtattttttaaaattttaattaaaattatttgaggaaatgcatatgtattataaaatgtattataaaaatcttaatatttgaaaacatattaacaacaaaaattatttatttagaggtgaataatttgaatataaacttgcatgtttaacctcatctcaagtactatgaatgcaaagtgaacccacctttttccttatattactaggattgtactttatccactggaatttaaaaataccgaatctcctcatatcttatttgagctcattacaaggtgaagactactaacattcacctaactgcaagcagcagaatccagctgaacacattttagaaattttacaatattaaggactttgttattgaccaagaagtaacttctcatattcttttttagctagaaatcctttcatacaattaaagcattgttagtgtgcaccatagggccgtgtgtgtgtgtgtgtgtgtgtgtgtgtgtgtgtgcgtgtgcgtgtgcgtgtgcgtgtgcgtgtgcgtgtgcgtgtgtgtgtgtgtgtgtgtgtgtgtgtgtgtgtgtgtgtgtgtgatttagaacatgcagtcaaatctatgaacaaacccctcttcgaatggaatgaaagcaaccctgggccttttttgcttctcattttttttaatttagtctcaactgtaactcaaatgtgcaataaaaaaagcaaagaccatgtgaatagaaaacagaagatagtgtcaggcagaccagcaaactgagtaaattagaaactgatgagtgcattggcattgctggattgttcaagcaccttacataatagtgatttgactttgacagtatctagaacttaaattgaattatgtttacacaggagaaaaaaataaatgagatactcagaaccgcctcaatttgcctttatttcttagatttctggaatttcagcacacttgccccctccatgtcctgtttattgacatctaaacattcttctgctacataataaattatgttattattgaaagtttatgctaagactttagtatctaaagtatagcaacatacatgtaattagcccttcggatcagatgtcaataagtaaatccaatcaacatagtaatttatcttccttcaagaaatgtctgaatatggataaggaataaagaaattacatttgactggtggttttgtcaacaaatatttttacattgaggtgtcaaagtgggcagtattagatgcatacacttacaaaaaacacaacaccatgtgttattaggaagtagatattttactttatattttagcaatagtgtcaaaacatttggggctacatttatttttaaacttaggtgttttaacagtgacatatttgcaaagctctgaatatcagctcccaaaagatttgttttttatattccttctaacagaatatattatgtggctaattgacagatatttcaattaagcaactctgagttaaatattgtttggatggaatagctatagggattgacagtttggcactgcattttgaagggtttggcatgccattttcaaaacaagtgaaatcacccactgcatcaatggtaataatagtatcaaaaaggcctactacaattaattctctgtatggattttggtttcatgctggtacttttcctttgacaggtaaatggctggagatagaatatagaagatagatttttgcatccagcccaagaggatttgactattccattgagcaggctcgggtcagctaagtccttcccttcaaagcatcatgggtgtctctgagcatcatcacaagctggtcctggcagtcagccaagcttcaaaagcctttcaccacagtcactgactcactaatgggcagctgcaggctttctgattctcctttcgtttcatgtgttcatttgacataaatttaattaaaccaaatctggtgttaaagcaagatgagataaaagtgatatgtttcaaattaaagaactgtgaaagatacaggaaatggaactatgctttaaaaaactgtttctataaaatattgtcaatttttgtaagctcactacttaaaattggcaaataaaatgtgtttttttaagggtaaaggtatgcattattaagaatagtgtgcatcccaggtttgatgaaggtcttggccccatattctctgtagtcaaacccttcattgaattactatttttctttcattctcacacttcaggtagtcacctattcacagggaatagccaagcctttccctgcactgtgtagttgctacacagctctgaattgtagaataccaaggagaaaatgaaaagtctatgttgactatataaaaatcatcatttttcaaagctctcttggttttcactgaaggctaaagaggtgattgtaggaagcagaaaaggctatgttcctttaaaaaaaacacatttaaattttttgaatgatagagtttctccttgcatccttgtttctaatttgaactaataaaaaaataatctcttgaggaaaaaaatctctagccactaaagaaaatttcagactacatatagatttcaggaactaagagatccttgccagcttccaaggaaagcacacaccatcatgctgtcactgaagtgcttccacctccagaagcgaactctttaccactcatgaaaatgaaaatctgcgcagctgtgcatctccaaaccaacagttgcacagtcttttgggtgagcctctgaaagggtgaacaaacagtgggcaggtgttccttagaaggcaattaccaggggttcaaagtagtggtcaccatgtgggcatgtggtgacttttgcccccagtggaactaaattcttccactgaagatgctacctggacaccacttcatactccattcaaatgatgactttctgtagtctgcaaagggctcagattcttatagatgagaatcaccaaatccttttgaaaacccacttaagaagtgaaaatcttaatgctcaaaaaaattaaataacttttgaagggtcacatcagccttattaatgcagctgaaacaaaatccacatccctatacccctaccccctatgtgttacatgtatgttgttcatttgtacttagactgagtgttcaagttaaaagaaaaccatctgtatatctaggtacttgcagtctcttgcttaagagaaaacattcctagtactgtagataaattattcaggctgggtcgattgcatttagggatgtatgttcatatagatacttgtatatacttgcaatgacaattaataaaagagaccagggatttttcaaagtatagaagaagcatatagcagggtttagaatgaggaatgggaaaaggcaagtgatgtaattgtgttataatcttagacataaaagaaagaagaaaaataaaaataaaaatgaatacctttgaggtgaattaaaaaaaaacaatgtaatcagtgttctcaagaactctacaagggtgttctttcataattgatttttaattgttggtcagtccttaagtgggaagtgctaatgtgaccacttttaaactaggaggctgagcaacaatattattcatcaaagacattcaattttctaaattaactgctacatttcaccagcctacaaagggagggatgatgctaaatacattgttctctttttaaaaatcactaaatttttactaaatggaaaatgtgcagatttttttccaggcacaatcctaaatttatttttggctattatctgtctaagcttttcatcctttccttctcttgtgccttgccttctcttcttttccttccccttgtccttcagtccttacacttcctcctctccctattctcctgaggttcctcccctctgccactcctctcctactatccctcaaccgctagttttctccttagtcaaccatgcccttttacctgcacatttctaatacagattcgacagttaatgaagatgttttcaatgtttacgtgaactttccaaggtccacattgatgtgaattttgttatggttttaccatgtttgtttattctactgagttcatctacaccaaaaatattaatcaaagcaagtactctgtgactttctgtgtacaaatagtaaactgcttaataagcaattattctatatatctgatgacaccaataccttatagaatgtattatatctttgaacaactaaacaattaacaagagtaataacaataataataataataataataataataataattaaagcttcataatattgaaagtttgaaattcattaaatattttcatgtaataagggctgacataaatctcaaaggaagatgtcctaaaaagcattaggtgatttaatcatgcgaggtaataaaattgaccaaacagaatataatttaaaatgattatcatgttaaaaaatttttaaagtcacaaatagatcaattttcatgaagtgaaatattcatataatattacaataaaatagctctaaattttgtttttttccccagtatgtagaaaatatatggagtcttttttttaaatactacatcttaaataaaaacttaaactataaaatacatgcaatatatcacaataattttggggttttttttccaacttttttatttgaattagaaacaggattgttttacatgacaatcccagttcccttctcccacccatcctcccctaccacccaccccaactaaagccctatctatcacatatcctttctgctcccccaggatggtgaggctctttctgaaatttttttccatattagttggataattttaaaatatttaatattatagacttaattttataccttacatatatttttaacagccataaagaatttatgtttctagtcaaacatcaaaaaaaaaagtaaatacaatttagccttgaagagccaaaaacattttgtgtatttgctgtgaaaaagaatctctgtaaagaagagttaatgctatgggagaggacatcccaagtgtgattccaggaatcctgcttcaagattcttaacagtaataagacttaagacaagctggtgtgcaggaattctttatgaatttatttgtgaaaaatattagttctccatcatcgaatagtgctaaggagacaactatttaaaatcatacatagaaaacagttctgagaagggaataagggtttagactgttgttcttagaaaaccaatttttaagttcccagtcatattttatccagtatatgctgtaacttatctgcagtggttagtatttgcttcaatttcttagcaatacttactgagaactggatcttgaaaatcactgaagtatggtgtcattcttggcatagtcactgactcttatggtaagagggttattattattaatggattggtgtttgcttggcttagtaaccttccgcacacatagatggtaagaaaaaatgccaaatatcaatagaaggacttggttgggatggagcgaaagagaatgataagggatgaatatgactgaagtacattaaaaataaaagactctaataaaaaacattgctttgtagaaaataaaaatcgctgtacaaattctaagcaatagtggagaggctaccttaaagtccttcccctataatgagattgatgtctaccttatatgtcatcctagagccttcatctagtagctgatggtaacagaagcagatacccacagctaagcactgagcagaactcctggaagccagttgtagagagggaggagtgacaagcaaaaggtcaagaccatgctggggaaacccacagaaacagatgacttgagaaagtgagaactcatggacctcagtctgacagctggggaaccaacttaggatgaaaacaggccccctgaatgtgggtgtcatctaggaggactggttagtctgtgggacctctggcagtggaaccaggatgtatccctagtgcaagaatggacttcttatcctagatacatgggagaaggcctaggccctgtcccaaatgacttgctagattttgatggtccttcatggaaggcctcatactcctttgggagtggataggggatggaatggggggattggtggggagcatgggaagaagggagggagagggaactggaattaatatgtaaactgtctgtttttaatttaaataaaatttattaaatttaaaaagagagggggaccatgaatttggaagagcgcaatgaggggtagatgagagggtttttgagtgaggacaaggaaggaagaaatgctataattatattatgatctaaagaattaaaagatgtgaaattaagagtttcttatatagaccattaaaataaaatccaaagacaaacatttgcattttgctggggttgtacctagcatcatgtggatgctaggaaagatgtatctcagtactatatcctaactatcagacaaaaatgaaataggccaatagatacaaatgatgtgcattttgtgtctttatggattcctatccctagatgtcatttaccattatatgaaatacaattaatcctttacatgcataccttctcttttgtatcttgtaaggcctgttcttttaccatgccctttttatttgttttgaaattattttaatgaatgtaattaatatgtttaagcacagttgtactatcaatggggagtaatttgatacttatatgcatttttctgtatttctaatactaaaagtcttgctaagaaagacactaatattcaatctgtatttcttctttgctagtcatcaaagtaactttggtaaaatactgctattttaaatggtttatgtcttattgaaaaaaaaaaggctaaactcttggtttaagtttgaaagaatgctgggtcctaaaagctatgaagaagctagctagatcttttggctatagatcaagaaaaggattttgcaggtttgtccaccataaattatccactacaattgtgccttcctgtgtttatgtttccattgccatcactgatacaattttgacattttgatttctaaattattgcatttaataactctgatctaattactaattaatattgttcattccatctttatctgggagtggttagtacttcctcagactctgttagcaaggtgaccttctcaatgaataaattttggccttgacactgctcaacctgtaaaaacctagcaatggatcaaggtgaatgttttccaatacactttttttttctgagacaaggtttctctgtgtagctttggagcctatcctggcattcactctggagaccaggctggcctcaaattcacagagatctgcctgcctctgcctctgcctcccgagtgctaggattaaaggtgtgtgtcaccaacgccctcctccaatacacttttgttgacactagaatttgaattctgtaaactccccaatgccataaaatttgattatttttaattttaaagcttgttaaattagaaagtactattgttaatatctgtttggatttggcttatagacatttgtttttgaatccctccaatagaaatcaggtaaatttcactttgtgaaagattctgcgaagtaacattaatgtttaaaagaaaaataattctcagagaagaatgaattaaagtaactgttaatcccttgcatggttatttgatttcacaagcaagacaaatgaaaatataaactgatggctattttaaaacttaaatcactttctctgttggatcatatcagggtctcagaagtaccctgaggtcaattttgactcaattttttaaatgaatattgattcttaacacagaattttcaagtaactagtgcttagcccctagttcgatttctttatgacatgtatatacacgatgacattccatcgtcaaaataaatattaattcattatcattaaatactaatttgtaaattcatacttgtacataagtattataggtaaactagcaaacacttacttgtgtgtacatatacatatatacttgcaaccacctcttaaaaatatacaactctcttaaacaggaaaaacatattaaaaagtttactaagcacaatggaaaaactagcaagcaaaaataataggccatggagccataaaggatctgactgtgcactgaaaaaaaatatgacttaggtcagtgatccattcttcctttattaaatttcgataaggaggaaaccatttaattattattcacatatggttggacaccagctatgtaaccacaaagtcaaactcatccataaacagtcacagagaatggctgaaatctccagtgttagcagttctgtgagacaaatgtggataactgttaagtagccacaccatctccaactactattttctagccaaaaaaaaaaaaaaaatgtatttcacattgtaaactgctaacttcctgtcatcgtttgcttcacaaattgtgtgtttagcttttatacatgcatataaaattatgcatggcttgagtgatgttgtaaatagttaaaacataaaagatattgcctctctggctgtagagtaaaccaccactaaatttcagcacagttggcacaaggatagtgcttcagatccattcaagtctgaaacagctttgatggtaccatttaagcttgaggtatattggcagagcagggatacaactaatctaattttggcttaagccacctattactcatattctctctctactgcattcacacttcaattaacaaactgtatatgatacacacatatatttatagtttgtatttttcctgtgttggcaatgaaactttttaaattacctcctggaagctgtgagaattttctatttgaatctgtttggtaagctgggcttagcattataagtgatgggtacatgggtttttccggcttctcctagagaaagttgtgttttgtcagtgcagctcacctctatctaatttacacttcccactcttcttgctaagcaggatatggccattatccgtatcctttacatgataactaacattcacaaggaggattcatgccaagcctttgtatgtacaagtttactgaggaaaggtgcattaggatctcaaaatcaggagacttgattcaggttgcaaggtcaatattttctgtggtcaaattctcagtctaactcacgctccacacctgtgacttcttcatggtcaggttttttatgtgaaagctccatatattaggaaatagagttctttgagctttgagatacagtagccattgctacaattaacataaaaatgatttttctttcctaaagtgtgtgtcttcgtaaatcttgagggtgagcctattttctctacttgtccagtttatgtcaggagaatttggttacatggagcctgtcacaataacataatcttatagcattgaggcaattgtgggggactctttccatttggcacattattttaagatgcttcttcatttggacttattaattctttttactaaagaacaataaaccattgcatggaaatgctttctgtattcattcgacatttaatatcatttatttatggatcatctgagttttaatgactacaaatgcgcgcgcgcgcgcgcgcacacacacacacacacacacacacacacacacacacacacacacacatatatatatatatatatatatatatatattatatatatatcctatcctatcctaactacaccttcacacacatttgtgtgtacatgttttcatttctacagataaatactgaagaatgagaatgttggaccataaatatgtttttgaacatgttgctcatcaaacctgccaggctattttccaacatgactgtaattttatctgttgtttagattgccataagcaattcatgagactcacagagatctggaactttttgagccatttcaggagccttgtacaggaatcctactgttgcaatttgcatttccccagtcacttatcagctgagaagtttctcatatgcttgtttgtcacctatttctttgtaaatatcttttaaaatcattttcccattaaagtaattggattgttttaatactgagttctgagatttttaaaaatatattctccatacaagcactctctcaaatatctgtattataaacattttctacctgtctgtggcttattagaaaatgtgccttcagtagaatatgtttctaactctgttaaaattccaagttataatatttttcttattcgttttaggtaatatttttatctagaaaatctgttcctgacaaaattcattattaaatatttgacttttaaaaatctgaatggctagcttaaatatcaagaaataattcaatctgaacagttatactagcttctttttcaagacatgtttattcttaaaaattaaaatagtatatagtatgaacatatacattatatatatatataacatatatatatatatatgcattttcaaaattagtttaaggttatacataacaaatacatatatacacatattttttctgtaaataaaatatagccaataatactgttctgtttttcttttggggtgtgttttttttccctttttgcaactttctttttatttattctttgtgtctttcacaaaagtcctgccaatcccacccatatcccccaccccaccaaaataaaacaaaataaagtttaagagaaaagaaagaaaagaaaaaaagggaaaatcttgtcatggaagctgcagtgtaacacactgagtcatgtagtaaaacacctttatccatacagttttatgtgcaggcattcatcgtaaaggatctcaggtatgattcgaggctcctggcctctactacaccattgatgctggactctcacccagactcatcctggaaattcatcccattgctgccctgtatcatggagatcctcaagccctgggtccacaggacctcctcccctacctactccaccctcacgctccaccagatcataaacctggtggctgttgagatgggccagcacataaccctggttctgggcctgggtggttgcagggttggtcagcccaccagctctcccttgtcttcagctcttgggtattctctctagcattcccatgactagtttatatcttgcagtaatgagcaaggggaagggccagttctctggctttcacttcctcagcaccagctcttccacacctacatgtcagggccagttccactgtgttgcccaggcaggaacagctctctcccttttgtgacctcagggccagctcttccacctgcctcgggctttgatgggtcgggagtggtatgcatctctttcctgcccgtgccacgacacgacagatgagtaatggggaaagccctcccattatcacaacatccatcagggctgactcactcacacctcagccaactggatcaactctactgtgctgcctaggtgagaagcagggcccactttcctgagtgctgcagctgttgcgagtgttaaggtataaggggtaatgggggcatctctcccccaccaacaccagcacatgacaaataaatagtgggtaacactttcccaagaacacagctctgaggctggttcacccacgcctccaccaattgggttggttctattgtgctgctcaggtgaggtagaggatgtgttcttccaagtgttgcagctggtggaggggatgcggacagggacagctctccaactcttatgaccttaggtccaactctcctacctgcctcagaaattgatgggtcatgatggcggaagggcatcctgaccagatccatgctgtcacaagaaagatgattagtggagctaagtagtgcagagagttctcccacactcacaacctggggctggctcacatatacctctgtcaatagggttagctctatttgtacagatgtcttattcagttccaaactaaaattatcggaagatatttcaatgaataaattgtttcaaaaggcaagcaacttttaaatataaatggtgttggtagcattaagagagaatgtttaatattttcaagataagaccaagtggatgccattaaaaatacaaaagaagaggaaaggcatgtttgtgtctctgtgtgtgactatgtagacatggatgggcacacttgaatagacaaatatgtggataatacacagaaaatgaatttcagaggatttgtgctcagggttttgaaaaaaattaactgaggtaaataactcccacctgtttaagatgataaattttgctctattcaaataggatgggaataaagaaatattaaggtaacataaatatgtaatttgaatgaagaagcatttttaaattagcaacattctcatagattgatactttataaaagcctcagcactcaaattcaaatcttcagaggcatcatctaatccaaacacaatagcattacacaaacaaggacctgaaaggtgaatattatttcactcccaggctccaagaaattttgcctaaaatgaccaccatatttttcttcatgagattaaaagaagtgcatatgtgcaaagcctcaattataattgttcttattctataaaattgaaatccatattgttccatgaaatattaagcataaaaaagaatttttttttacaaatttgaagataaagaaaaccctcaaagaagatgcagtgtctaaatgttgaacagcatgtatatatctaataatgaaaatgcaaacaattttatctttttactgttggcaaacattacaactatttggtttgctattacaattaaaaatatataaagaatggctgggtatttgtggcgcttgcctttaatcccagcactggggaggcagaggcaggtggatctctgtgagtttgaggtttgaggccagcttggtctacagtgcgagttccaggacaacctccaaagctacacagagaaactctgtcttctaaaacacacgcaaactatatatatatttagaacagaggcctgtttgtgtctctttgtttgataatatagacatggatagtcacaagtagagaggcaaaaaatgaatttcacagatttgaagtgagaattgtgaagaaactaggcttaggtacacaatttctgtctatgtaagaagacaaattctgatctatctaaacaggatgagagccatattaatgtgttacaataaaatgtgaaaaagtgctttgggagccctctcctcatagagggatactctttcagcctagacacactggggagggtctaggccctgctccaaatgatatgacagactttgaagatcccccaaggaaggcctcatcctccctggggagcagaaaggggttaggatagggattcagtggagggcagaggaggaggagagggagagggaactgagattggcatgtaaaagaagtttgtttctaatttaaataaaaaataaaaataaaccagtcaacatctgagaacaatacattaaaaatatgtgaaaaagagaggaaatcataatgacttgtgcccagattttggaacctcaaaagaacctgccaaaacggagacaacttacagaatgcaaggacaaaggtttctttattgactggaggatacgagctgcagcaaggaccccattcatccgggaaaaaatggagtgccaacttttgtctgaggggagtttttataaggcaaaattgtagggctggaagtcccaagattacagaacttccatggttacacaggacagagcaatggttgcatgcttcagacaaggtgcaattaatcgggatgctgcagaggaaatgagtttgttaattatctcctgggctggggacttctacaattgataactatctgatcctctttcgaccagaggaatgtggacactgctcaagactgtgatatctggtctagggccttgagtcatgtggacctttgtttaaccttgtttgctgggctgccttttgggaactcagagttttctatttaggttttgcagcctgggttttagccttttcttaatttcccctttcagactcttataattcaaacaatacttcgaatgagagcttagcattatgcatataaagttctcaatatacattttattggatcacccaatgccaattcttgattttactacagtgggaatgagaaaatcgtattaaacacctctatggaaataacactgaaacattatttgaaatagtaagaaattgatgtaatgataacttgtgtatgagtcttacaggatactatttcatagttaagaaagttatgggtttacctttgatgtatgacatttggaaatacaccagtgttacactattgaataaaacttatactgtaaaccagtgctatgatgttaagacccagatgacatataagccagatattataagaaaggataattgattcaagaacatcatttctgtgccttcatggtgtcttttgaagtctgattgacataagaatgaaataaacagatcagaaaaataatttcatagcaaagatactgacacctactactttggaaatgattatgatatgccatgaaccaagcatgtttaagactgattaatatctatttttaattatgactaaaaagggatatcttggttggctctgtaatataggcataaatgatgtcacttcttgataatccctttgacaagggtttatttgtgaaacaacaacctctgatgttcaattttatatcatgttatatttgaaatcaccaaactgtccacattgactgttacataaaagagccctgtaccaaatgaaataatggagacaaaaacatgactatgcctgaagagtttctgtgtgctaagagagaatatgtaagtgtataataaatgataatttgaggaatttaaatagtcctaaatgggttggagttatggctcagtggttcagagcacttgctgctcttacagaggacctgggtttggtgcctagcaccaacatggtaactcaaaatcatctgtaattctagatcccaggaatatgatgcccctttctgatatattcgggtgctagtcacatatagttctagaattctgcaaagagctgcttttttcttaatttaaatattcagagtagaaatatgatattttctgtcagattagcagctgcacatgaacctactgatattttaattgtcatcagcagtcctactaccctttagcgccttatgggccactcaggctgcagcctggcagggcttccagtcctgtggccctggctctgctgaagccatgatatgaaggtttaaattaagtctctatcattgcattcatcaataagtttcaggaatcaaaggcaagagtaaaacctgctagctcaggaaggctgagtagcaactagctgaccttgcttctgggcgtgagataccacaaaaggtatcttctctcattccagaacaaagcaagatcaaactatagtccctatcctttccttaatgtttgtcttctcaattctagtcagctagtcactggctctgcctcctgattcaaggtataactttattgggcaatctcgggagtgtcagagtgcaatccaaatatcccacaacagaaatactttcatatttagatacagacatacttgggggatctaaagttcattaagtgcccaatgaaaccacatatttgtctagtaaataagataaatacattcgaatgaatttaaatccaattcattgtgcattttgttcatcttagaaattaacacactaaaatttctagttaagagatattttaagttcttagtttgaattagttgatttaatattcataacaaccctaagacacgacacaaaatactgagagaaacatttctgaaatggagagaagaaggtttgaggactcactaaaatgagaaaagtgtacaacctaagaaaacagtgtcagaatggctccacaatctagaagacaacatcagtggtcccgagaaaactgaaggaataaaatttttgctctggtatttttatgaggaaacagagtatagctgggcattcattttcatgcatgctgaggcagagagtacgccaggctaacttataatgaataaaaataagcagtcatttctcacgtgtgatgagaaaggctgtttgggattttgtggtttacagaatgacaccagtcttgttctgctaatacatggttgtgaagtcgtgataacttgcctcatcttcacattttgttcaatggagaacaccaaacctcaccagtttgtcaaaaagtgttagaaaagtgttagaaaacccaggcatctgcctggctttcttcatatcagtattgtgtcccaaatttcctgacaaaaatactagagtacgtatctatgtgttttgaagacacaaacttaataacttgtataagaaagataaagggactttcactctgacagagtatgaatcattttccatatattacatcataaaacctatacttgatctttgagtttcctggtatatgactgctcaaatcctggaagtttggggatttttttttatcttttatttacagtagattcttttcttccatagtgtatcctgactacactttcccttccctctagtcctcccagttcttccctacttcccctcttatttggattcatacctgtgctgcctttcatttaaaacaaaatgatttgtaggagccaaagaggtggaggacaccactagcacatagcccacagaatcaactatgtgatggcatgatggcacataaggccttaacgagactggcatgataatcatggagcctgtgtgggtttatgctaggtctacatatatgttttggttatgaagcttggtatgtttgtgggactcctaacagtggaagtgggtgtgtctctgaatctttgcggactcttgggactcttttcctcccatggggtttccttgtccagaatcaataatgattatgagggcttttgtcctgtcttcttctatcttgttttgttgtgtttggttatatctaacaatttacaatctatttgccatctacctttgatacttgaaagcatttagcttccaaataataattttgatcattgaagaaaatatgaagagcagaactcccctctgtactgatgtcttggtctcatctcgtctaagttcctctgcttgaagttcctgagaactctctccctctgttttgaatgttcaagggtgtttttgagttgggatgacattaacccttgaactgaggataaataacaaggcattcaagctcttggaccatccatagcaaaccagagaaatcatgtgttaaaactaaatattaactctttgaggccaacttaaacttttgtttgtcttttgaaaatgtcttcatttatttataacacaaaaaaaaatgtttgtaggaaagtgtcaatgactcagttcagttttataaagcactaacagttcttgagaggaaacatactatattgagtaagtgtaaataggattattggtcttaatataatctttttaaagagttggcagatggtgactacaatgaaatattttgataactccttgttatattttcagaaagttggaggctcggtgaaaatatgaggttctaaatatttgaacatcggatgcttcctcagatcaatatcaccaaggctttctctttttcaaataaggtcttgtaatttaaaaagaaaagaagatggagctaaaagaaaaggaaaagaagaactaatggaaatcaattcaagactatcaagcatcatacgtcctaggctatccacacttcttccaaacagaagaaacatcctaagaaaagctttatagaatcactggtacaacttagaatagtatgtcagcattaaaaatactgagttggctggaaatactgtggtgtgtcaacctttatttgccctttaaatcaagaaaaaaaaaagaataaaagtatgcctgtaggcaaaataaagttcccttcttcccatcaacccccgccaccactcttgctcttcaacttatatgtgatttgtaaaatgaactgtaatagaaagttcagatgacaaaaattgcagtggtgtggccaagaaagcacccagggggcttttagcttccgttgtgccaggacagaactatcagatcagccttctggactcaaatgcgacactgtcaataaggatacatcatcttttttgtggtgtagaagagctgtcggttgtaattcccattattccaaaggcaggattttccattagtacagccacctgctgggttcctctactcaggtttaatggaatctgaatttatcaccatctgtgggaagaatgagagtgcgttgctaagtcctttcttcatttgctttgcagtgttgagtataatctttataaggaagaagcaaaagctgctgggattgaagtacatggaatagtaatttagctcaccttgacatcaaagctccagacctgggggggggggcaatgtagcctctgctctagtgtaattcctgcaacaaagatgatgtattaatttactatgtgatatagtatcaaaattaaacaaattcaggataccattctcctttggcttaatagaaggccttgaaagatttcagcagatctctggtaatgataaaagatgtggcgatatatcaagttcaactaaaaaagttaatgatacctattagtatgtatcttataaataggacagtgtagactataactgccagttgtatgcaggatgttttcttccacacattaaaaggagcctcttcagaacacaagaagaaggatccggggatatcaatcattgcagaaggcatttcatattcaagttctgtggctaaatttcatgtaagtagagataggtagttggaacttcttctacaagcttccaaggatgcaccattgttgtttttttacaataataaaaagaaaagcaaatttgacagcagagtatgcgactgacaatactgacactggctatgtgtaaacctgcaggtataatcttccagtcacatttataagtcccatcatgcttgctgccttctagattctgctgtccaggcaaagactgggaggaaagcagagttgtcctgatataaaagcagcagtaggtgctattgccctcccaaaggagctctaagcagaacactacagcagctgaaatggtgagggggaaatgcttaaaaaaaaaaaaaaacgaggaatgatgaaaatacttgcacaccccagcccccacacactgagatggtactgggaagaaacactgtctgtcattgtctttcttcaggaaccatgagttcacccttttctcatgagtgcccttctatgcttataatcttggattaatgactccaaacagccagtgttttctgaagtcctggggtcaagctctgtggattgaagagcttggataattggagggaaaagctacttactacagtgaggcaacaattccaggggaggaggtagcacagcacaacaaatcaccatcctgttattctctgaggctatggggtgagtctgctttcccatcagagaggctgtgaaatctgtattgtgacaaagcaaaatgcctcccgggtgcacgcttcttgggaaaagtgtttgatgtttgatctgtaataagacagaagaggaaaacagtccctttggttcagtaatgcatactggaagtgaacacaatcaaagatttaaattttaactctgggacaagttgcttcatcccactaatttattatttagaaaattctgtatgctctatttttttttctctgtgttggatctagcatacttgtgtcttccaatcttatttgaataagtatgaggattgtgatgcaaaaagcatccatcagtttgactcttttatcagtggtgttatgtggctttatggaactatctgcaagcaaaacctgggactgcacattgcaacttggtgctgtggctagaaagctcattggtagggagctagggaaaggtggggacagctacctgtaacaaacctcacaaggaacagagtgaaaaatgaaacaagaaatggaatacataagcagtccatttctttctgcatggcatgctctgggtgatgtaacacatatggttattcataccaggagcaccaacttcagggatggagacaaaccctagaaaatctgtcagcttgggttaatggaacattgttattacctcaggtcaagcagatggagggcaaacttctctgctggattctgctgctctttaattaacgtccacatttgttatgtcaatttaatgcatcacatttgctctaaaggttgtgttactttacagcaaaaattatcattgtatttaatttcagtgtttgaacaactgcacagaatcttaatggtacgtgtagaaacctccactaatatttaaatccatgtgcagaagaaaatgcaaaagagaaaaggaagcaggctggttttacaaatctcagtcttgatatggaggtggtattcatacttcttttatgtgcatatccaaataagagatttttgagggcatgcatacatgaatatataaaagaaaataagaacctcagatgataaaggaatgtgggccttattacagtgttattctttcataaagaaattaacagctgcaagtcatttggggtgtgtttacccttgccaggaaagaatggcaagtgggaaaacagcacaatggagacatcttatcgtcttttgtaaactttcattatcttagccttgttcagaaggcacaagggatccctggtgtctgacactaggcatttgaagctgtggtgttaatgctttagcagaattcaaagcaccagcttattatgtaactaccaaaaacgacgtgtgtcatagctacaaatgctctttcttaaggatgacaggcttacattgttcattttggaaaaatatttctgcagtgctggctctagcttctaattatttaagctagtcaaatccaaaatcgttaagatgtgaaaatattacctggaataactccaagaggaaacagtaggcagtgatctggcccgccctgtggatttaacactttactgaagcctcaaaatggagcatagatatcctttctaacagaagtcaatataatgataaaaaataactctattttttatttcacaggtttctgaaaggcaggactacacgcaatgcaatgtggtttgatatatagaagatagtaattggattaggctttgggttatggctaagtataacacactctcttttgtttgtttgtttttgagacagggtttctctgtactgttttggagcttgtcctggaactcgcttggtagaccaggctggcctcgaactcacagagatctgcctgcctctgtctctcaagtgctgggatcaaaggtgtgcgccagcaaacacgctcttatgtgagtattttggagagctgacataccctacattttgttttctgctatgccattcaagtttctacccacttcaaacattttacaggttcacaaatttactctagtagttgttaactcaaaacaaacattaagagacaagtgctgtcaccatattttgttaaactgagaatttagttcaataattctcaaataatagtttctccatgttcatgcacttcaggagagggatatttgactgaactatagtggatagaatgcaaatacaaatgctagtgaaaaaattcttaaagaaatgggacagactttaagcagcaaattatgtgtgcctaacattttaatgatgcttctgtttgaaaactctgatctctgtcaatctgtcaatgaaaccattaagaaggaaggaaggaaggaaggaaggaaggaaggaaggaaggaaggaaagaaggaaggaaggaaggaaggaaggaaggaaagaaggaaggaaggaaggaaagaaggaaggaagaaaggaaggacagaaaaaggtataataagcagagaaaaaggaaacatatctaagtaaatacctaaaacaagattttattacccaaagatttatttctacctatgtaccttataagagatgagcagtctcagtgttggtttccttagttgtaaataaatttatgacagttaagtgttataatgaagtgtgtaataaatgaaccaagcaaaagtaaggtgtttttgctccactcttttcctttaatttttattatttatatttcattttgagaatgtgtcttataatctatggggggaaagtacttaaaagtaataaatcaagtcaggcactcaggaggcagaggaaggtagatctttgtgagtctgaggccagcatggtctacagagtgagttccagaacaggctccaaagctacagagaaaccctgtctcaaaaaatgaaaaaaaaagtgcaaaactcagcaaggcattatacttagatcaaaaatctcttattatcaagtctttacacatctaagacaaaacatacctattaggaaatgcccctgacctgaacttcattatccatgcttgttaatatttaagttcatcttagaattttatgcttgtttatttgttttttaaatgatttttgaagtgactctaacatttatgaatgttttatatttcctggaaaggataaatactcttgatgcttcttacatcgtcttctttttttatattcttcatttcttagccccctgctcaaatattctcttcctcatgcccaggaaagaatttggggcatggaggatatacaagaaagaatattgtgtttctcaaaaaagaatccaggtcatatctttcttattaacatgaacataaatgtaaatctctaaatgaagatgttacctctatgaagattatagttttatttctcctagtcctagtcctgctggatatgtgctactcttataatctaaaagaagcataaacattgaatgtgtttttagacacagaaaagaaaaataaacaaagataaaattaaagacatgtaatgattaattaacaagatacattcatactataaaatatcaatagaactacacacataatcatagatgctttatcatcatagcattcaatggcagaaccagatctaatataacataaactgttgagggatatttgatcacactgtgatccccaagtttgcatttgctttaattaaataaaattaatcttggatcaaggggttgtgctaccgacgagtactcaaagtaatcatagagcatcagagtattcagaagagttagagagatgcacaggaagtagttgggggggatttggagtggtatggcgtcttatgcttttgggaggcagaaggatgctctctttcctataccaccagggagaaaggtttagctagttgctactccacctctctgagtatgcaagttttcactccagcttttgaatcttggatcttatttataaacagaacaatagatacttaattaaagctacctttagtggcagcaatatggcacgtgcctgtgggaactgaattcccaacaggctacagactgcctgactaggctgctgccagagaagcaggccagtaactacagagatacaattcctggcaaaaatagcactagattaaggaacagccactgtgataaagttaaaacaaggataaaaccctaattctcttacattaaaagttaataatgtgctggatgatataaggtgcatgcctttcataccagcattggggaggcagaggtaggcagatctccatgagttaaaggccagccaggcctacagagtgagttccaggaaggccagaactacacagagaaatgctgtctgaaaacaaagcaccaccaacaacagaaccattagtaattggagtatgttttatttcttgatttagtggggggtatatgaatgcattcaccatgtgatcatttatcagacatatattatttttattttcatagaagtaaattgtcacatattaagaaggccagacaaatgccatgacagactcctaacagcttaattaaaactaggccccagttcctgcctcttgatactggacaggcagtctctaagaaagccacaaccaaggacaataaatcaaccacacctacagccaggatgaggaaagtgtggcccctacaatgtcatgtctcaaggcaaggcgcaaataaggacagatggtggtacttgtccaaattttgcccaaagatggaaggactatagccttagcacactcttgataaccctaaccaatcagaaatgtactagtctgattgccatctgcttaagccaatcctagatagaatgacctaacttcctttataattcctctagctatgtataaaaggagacttcagcttctctctgggtcctcctttcacctttgtgcaggtgctggttctctttttattctgagaattaaatgcttttgctaattgcatctgtctggtggtcttttgagggacttctcatggaccctaaacatacttagtggctttaaatgacagtcatttttggaaacaacatgggtcagaagttgtggctcagggatttctctgcttagagtctcacaaactaaatttgagagtggggctaattgctttcatttctggtgagtctaggtaatccagagtaggtttccagactcacattgttgcaaaattcaaacccctgtggtagtaggattggaataggattactggctctcagtcaaggtttgctttcagtttctacatgctatgcaccaaatataacctgaagatttcttcatgttcaaggccaaccagggataagctgcattgtttttgtagaaagtcattcatggtcttccaccacatatatcctgcctctcctctctttttgtatgtttcctacagttgttataaatcaacacatttttaaaatacatacaaataagttgtagaatactatttatggtttttagtaaattaacaaatatttattaattgctaataaataccatgaagataatagctcctgtcttttgaggcatgctttttaaatgtacaaaaattatttcataatgcatatggatacaaaggaatatattcgaagtattttataatgacaagaggtctataaatcacattctggataatgataagtttaaagagcataacttctgtgaagaagtgaaattaagattaagcaatgattaaaaatttaaatcactttctatttgtttaaaattttagaaaaatgaaaaacatgcaaaatgtaatagagaattttaaagataaatttagaaatttattatatattcatttaattccaatggtttacttttaggtctgtgctacaagttgaagttaagatgctatgttttgaccacagtgacagatatataacagctttcctcaaacaccgctttgcagatgaaaatgatgagccctttgaaggagtattttcttattcatgggcttcttctcatgtttacaaacactttctgttgctcagattacagcctaccacacagccaacatttaataggtacttgctgaataaatgaatggttatagctgtatggcatctgaatacaaatagaagtagtagcaaaagatggccagcatttatttcctactaacttttctctctttctcttgttatggaaatatgtatgatgcatgcaccagcaaatgttgtctaccaccttcacattttctggagcataaagatcctatcgccatacttgtgagattgaaaacatatacctgattaactgccaatgggaatacagggaggtatatgatttgtcacttctggttagaggtaagaaaaattaaaatggtttctacacttcactctcccttgtctttgaatgttatagaaagagaatatgggatggaagatataggtttgtatagaatgtttgcccactaagtctgggatcaattcccagtactgaaaaaaacaaatttaaaatggtataaattgaagatgtaaatgattcaattgactcttgcatcatgtatttctgttttgctatctactgtttaccagtctaataggtcagagagtcttataatttcctctcatattttaatgtctacctcaccatactatttcagtttaaaattccagtaaatcaatacttgtgtttataggttgtttgtacagaatcagggaattagaagaatttttcattatttggagacatttccaagcaatttcatttgtagtagatgttcactaaatgcaaatgatttatctggagtcaaattacactatgtgactactgtctttaaaacaggccagagaactgaacagtccaagatttgccatttaggtccagctcttttgtcaagatgctaagtgagatgattatctcacagtatctttttagcgttgtgttagctgtgaacacagacctctgagttactctttataagtatctcaaaagccttatgatattgatgactacaatatataatcaaccagattatatggatgtttacatggatgcctcctatatggtttacaaatttcatggcttcagtttatatgctgttttttaaaatgtactcaacctttgggaaagtacataactttactcatggaaattctaaaaatcatagcatgttttacaatttgcttgatatgacaagatagtcaaatattctttatgacaagaaacaacttccaaggaaccaccaattttacaaactccagaggcaccccatgtgactttaatcaggagagaagaaaaaacaaagaaatcatagcaaactgcatattaccagaaaactgttaatattaccttgttgtaaattgttcagaagctttggaaaatagtgaataatattggcaaataactattctgaaatgtatgagttgagttcatgccaaacaaacaaacaaacaaacaagcaaccctgctagttatctacaccaatccctagaggaaattgaatcctattaagagatattatattgagataatattatattgaactagactctaccatgagctgctaagtgcttctatgcctgagagggcctgtggaggacagccacagctcttccctaggccttggcctgaagagggagaatcaactatgagcctgccaggagttaaggcaccaagcagtcagtaccattatggtaagtgagtacaggctggggaaatggaagagagagtgaggtagattgtgctgtctgtgatcctgttaccaccaaggtccctgcagatgattagatctttgaccaagttggtgttgagatatgtgtcccaacagaagccatgctgatctaagaagacatgcacctccaccagagactacggagtcattcctatctgggtccagactgctactggggaccctgtctctgtccatggtcctgttgaattgtctgaattgtcatctatggctcctgttgccactgagggacacacagaggcctgaagtctgggatgacacgtgagaccatgttggtctttgaggtttaacctgctgctggggccatacagaccttggtggtctgtgctgccacccagggccatggtgtcacctagacctaaacagtcactgaaggccacatctggtttcatggccctatgacatctggtgtctgtgttgatgttttttgctcctgttaccatcgaaggcaaagcagatgcccagggtctaggctgccaactagagatatttttatgttctgggtctatacaagtcttagtgacctatgctgccatattgggccatagtgaaatcctggcctctctgggtccattggtccaactgaagctggagtctgtgtgaatatccatggcctgtattgccactaaggacacaaggacaccaggggcaaggataggtcttcacagagttagtcctgacctttactgcctgcagcactatggagacctagtcctgtctttcaccaccagcagcagcacttgagagagtgaaccctgcaccttgcctgggcaacacagtagagttgtccctgttggccaggattcagataagctggccctaaaggctccagagtaggagagttagctccactggctatcaccctatagtatgggtaagggagagattttcccctcccctcttgcctcttgtccattgtcacctacgcatattggaaaaaatggtcccagtgtcacaagagtgggagaactgaacctgcccctcactggcagcagcacccagaagagtaggccttgcgcctcctctgggcagcatagtagagctcaccctgttggcaggggtgcagatgaactgactctgaggttgtgagaacaggagagctgacactggccccttccttgtaagccctctacagcaattgggagatcaggctctgaacaacacctgggcagaacaacagagctggctgtattagtgtgagtgtggatgagtctgacccaagggcctgaaagtagaactggtcccactccttgctgcaggctgcattaggtaagctctctaaggctggagaactcacctggatagtgatgatcaaggaaagctggtgggctaaacaacccagccacccctcagacccagaaccaggtgtatgagttagcccaccccaacaacctcaactatgaattgttggagcatgtgaatggggcgagcctatagatctaaagctacaggatcttcacaacataggaaaacaacaggatatccaggaggagtcccagtcagagcccattatttataaagcagcagaatttagagacctctaaccagactaatgactccttacaatgaacacttacaagtaaaaatgtatggactaaatggtatactgtgtgaatcactgggccacactacaacttccatattaaggtatggtttgtttgttctgttttgtggtcttacttttaaattttgttttgttttggggggaggttgcaagggcagaaggtggaagtgaggggatggggaggtgagtgggattaggatagacgatatgaaatccacaaaaaatcagtaaaatataaaaacattgagataaaatatttccactttgaagggaaatcttgtcatgcattaattatgagagcaatgtatctttggtgtataattttaaatcagaacaaaactcaagaatgactttatgctaattttaaaatatttttactaaaacagtaaaaatggcaaatgcaatcacaaggaaaagtagagtacatatgtggtgctcaaaaatattagttttaaataaatctctgcctaaggtagccttgaaaattgttcacaggatgtgtgttggaaggatgggcacaaatatattaaccaatatatttgtgtttataatgctaaaaatcaactagttgttttgattcatatgcccaaagaaaacactgtgttgtttgtgtgattgtgggtgatcattatggtaagtatctttccagaatgttttatgacacttcctattttaaatattaaatcaactaaaatatattagaacatttatttcattaaataaattgatactggatagcatgtttctatcttgttttattacttgaattcatagaggaaattatttgttcctatggtgatgccaagaaatgggtgacccactggccaggttagacgaaaggaaatgcattttaataagaccactgtgcctcaaacgttgtatgtactttttacagcttcagagtcagaggtgccaacaaactatcaatgatataacatgatgatttattaatttctaaatggcataaatttctactaagaaattatgatggaaaaacacgtcagggatgatatttatgatttattaaaccttgcctggagattcagaaagcaaagtcagccacaagctgtagaagccagacacatacctttaatcccagctgccagaagctaggaggtggtgatacacacctttaatcttaggactaaggattaagaggtagacagatctgtgtgagtccaaggccacccagattgaatcagttgaaaagagaattatagctcacatctttaatcccaggactcatgagatatatataaaacaggagcaaggaatcagtatcaagcattcattctctagcctcattgaagagaggaacattcatttaccagccacactgaggagaggcagcaggaacagcccattcaccctgaagtagtggtaagcactaggtagtggcccactgctttgccttttttgacttccaccttgaagtttgagccccaatatcagtctctgggtcttttatttttcatattacacacttctcaaacacacactatgaaaatcgtatctttctagttaccaggtgtaagcggggttcttaattgatacagataataaaaacctggagttagatatagagggaaatgctgagagcagagagaaggagcaagccactgccacaccttacctccttagcatctctgcagacaagagaacaagttcctgtttgtcctggcttatctcctgttcctgcccagctaactcacttcctatctgtctgtacggacctccagaactctagacctctagtggttagtggcatactctattctctgaccttcagacaggctttatttgtataagaaaggtatcaccacaaccaggttcattagaaatcaaagtgctattaaggatagtactttgtagctattaaattacaagttaagtgataggaattgcttatatttcttgaccctggtatttatgttgtagttgtttaataattaactcatttaaagtaaaaggcctagcaagtgagaattagtcttcagacacattgaggagctcatagcagtcaggattgcagtcagtggcttggtggagaacagtgcaattaacattgtaatctgaagattcctggagacacaatcatccagtttggtctgcggtagacttaagagccagtggccaattgctttgctttcctaattttcagcttgaagcatgaaccccaatagctgtctctgggtcttttattattcatgatacaaacaagcctaagaaataataactgattgtctaatttgacttttttgtatctttaagtttatatcatttttagccttcatgttctatgcaaacgatactcatacaagactctttgaactggatgtgatctccttggtgcagaagtactgtcactgcttcagaaattgaagaagcccttctcaaaacagttgcataagtgtacaacatggtaaagcttttctataaagagccaacatgattcattgtatcatttaaatgataatgtttttaaaaaataaatttgaaggaattacttgtgtatgttagtttcagtataattgttatccatgaagagacttagcaaaaatatctttggctactggatcaactgtacaaaagatccctctcatttgtacatcagaaagagatgagctgaccctatcttatgtctgaaaggtatgaggggattcataaaattgtgactgcttgttgaagacccatttctcacattgatcatggggtgatatatatatatatatatatatatatatatatatgtaatatatttatatgatatacatatataattagttgaaaatctaaactatctgtaatataaattgttcagttattcatggtgtttgagtagaaaaatgtagaacaaaaaagtaaagtttaaagtattcactttagagtgtttgggaagtaattatgcctgggtgaaggcagtaaaatcagaaatcatctatcaactttccaaggctatttgtgtagtaaccaaaactttttagcctcctctgtgatctgaatataatattccttatccagagagaaggtccaaatcccaaggaagaaaaagaatctctcagtcttgcctttgtgtttattgttgctgtttttctcttaacagcatatttagcttttgagcctcagcaccaggtcagtggatagcacatgtactgttttgctgggcaaagccttagagagaagggacaaagtattgtgatcttactgttttataacttcctaaatatttctacagcacgaagtaaatgctggcacccctcagtggaaatatgatgagaatttctgactaagtgaactgcttatttaagtgacaactttttccattttgtagtttcttttacccttttggtatctatgacagctaatcttcaatgccaacttgagtgaatttagatttaccatagaaacaaaaactttgtatatatttttgaaggtattttagaagacaaaagacccatggtgaatgcaggtgacatcatcctgtgggccagtatcctggaatgaaaaaaagagaaaaagcaaggtgtgcaccagtattcttcttgttctgttttctggctgggtgtaaagcaaccagttatcttttgtttttactactattacttctccatcatgatgtactactgtagaactttaggccaatgtaaactctgctttgtcatagcaatgaaaaaaaaaaaaaaaccaacagagtgtcagaaaacagactatataagtgatggccaggcaatttaagagtagattcactgcatttagatttgaagttaccgtggagaacttgaaacccaatccctcctttttataaggatgatttgacctaaattgctgagacagtgatagctagatttgggctttcttttgtatacagtagggataatctctaaggttttcatttttcttatgtcttcaatgttactcttatcacctatattcttattatgctccctcaaagttaatattcttatttagtttgtcatctataacctcaatatctccttgatatttgactaagcatataggtactagagcaacctctagtacctccatggagtaaagaagagaccctgagtcaggaaggtaaataatatcttgatagtatggatttcctatactcaaatacaagttttgttattgtccattaaacaaaattaggtaaaataattgttaactaaatataagttttattattttgaaggttagaatagttctaacaaaatatattcatgactaaactaaaatgactagaataaagtgcttacttaccacaaagtaaggagtacaataaatgctcagggaattctgttaattttttcctggaatgttcaatgccttacagagctattaaaagatatggtattttaaacctacatgtgcactcttttttaggattactgaggaccagatgtgtccttttgcttttgctactgcagacttgtttcttctgtaaacaacctcctctcagggccattgaaaacaaacacctactcttaggttgttcttatgtatcatttatagtagtgtgttatggtttctgtagcttactctaacttatgcatgcagtctcaataaagagaccattatttgaagctctgaaatggcatgcctgaagtaaaacaaacatacaataataaaggtgaaatcattctaaaagtcactttgcttacacaataattatttaaagtaattagtttaccaggagttagtcttatagtacagaagttaataacatgtcaaaaatttagtgataactaattaatcatcatatattttatatcttacacatttactcaatgttaaaaattactctgagcatttgtacacttttaattcatttatcttacaacagcaccttgagacaaatattaatattttttcttatacaccaagggaagaaatgtagagcactgagaatctataatatatatatatatacatatatatatatatatatatatatatgagatatatatatacatatatatatgtatatatatatatatcttataaattatagatgcaatacatatatgaagttatacagtttgtcaatattatctgtggcagaagactcaagccatctattcaaaattccttgttattttatccatatgcaaatcagctaaacaaaggtctctgagtaagaggttatggggcataacacggagccttggaggtgctattttgaattaatgggaatttttaaaatttaattttagagattttagggtttttttatcatgtgtatatggggtagggtaagggtatgtgcacatgttgggagcatgaaggttcttgctcccacagatcgctgtggaaactggttaagtaaccaggactgtcttgtcaatagaaaatttgggaatgacaaatggcccactgatctgtgatatcaagctactacagccaggactggatatacctaatagtctataaccaggggctcccccaagctcccacgactaggaccaagaggtgtctaatagcccaactgatctctaacctgtctatatgactgagaccaggacagatacttctttatgcccttatatagtttgctaacatccagaaaccatcttcatgtatgaaatgatatgtaccctgagttgagtataaatgtaattatgatatcttgttcaccagagattgtattgcaacaggaaactgttcccaaattgtactgtgttcaaaaatgctcataataaaccatctggcatcagaatacctgaagcttgatccaggttgacaaagtcactctgaaccaagttttcattctgagctctttgtggttcactgcctgcctggacagctgcagagactctcttattcacagaagtgtagatgattgtggaggccagaagagggagaaaaaaaaaatcgatggagctggagtcataggcatgggtgacgggagtccaactcagttcctctgcaatagaaaaaaataaataaataaactcttaatggctgagccctctcaagacccggaatttacttttatttataagatttaattttaaagagttttggacaaattcattacaaaattatgttttgggttatattcagtattttgggttatatttggtcaaggagaacatcaatcttgtgttggcttggaagaggaaaaagaaggacaaagagagagggatgtgttattggggcaggaaggagagacaggagaaaaagaggggaggtaggtttttaaaaaaattatcaccaacacttacctagttaacttcagttaaaaattaaagctgtcactaagtttagagatacataaactacataggttgtgagacatatcagatttgtaactacagtccttcatcaacatatatttgacatatgcacatagatgcacaggttcctttgcatatatatgttcagtgtgtttggagactgcatttatttttatgtttttaatgttttcttattatttgacagatctaggtacctaatttagtgtattttcactaaattaataaattctgcctgtacaattccccttacttgacagttaacatctcagtgtgagggaaggaatttaaccccattaaaaatatggcctatgtgggtgactcacagtagctcaaaatcctttctgtttggttccacgatactgtgattattcaaaatggttaagtaatcttggaaattgccgaacctgatgataactttaatttcaagtctttgaagtaccctccttgacacctcactacttttatggttgtcttcaaagttcacactgtctcatttacaaaaatctctatgtagatctattgcaaattgtatgtcatgtctgctgtgctcatcataccctcatcaacatattttgaggttattaataacatgataattttgaagtgttatgtaaaaaaggagccttttatgtaaaggagatcgtgttaatccaagctgaagtttatgcagtataggcttaagggaaaagaaatttgaatgcaaattgaattgaagccttttttcttttctttctttctatttttttttctggaaatactgtgtttaagtctaggaggaaatgactgtagctctgactaaaacttggcctctaattcttttatatttgattaaaaagaaaaaaaatcctctcctttagggaaagtgtttgttaaaaggaactttattacatttcaggccttattgtgtagacactgacaatgtgcctcatagtagtgtgagcagtcttgcaagcacagagagatataaaataattagtggattcaaagaaattgagaccttagaacagagaaggttgttctttctaaaagaaaagatttgtagtgaggtgtaatgggagagtgagggcatactaagggagtctcctcatattggttccagcaatcatgtcagcctctatatgtagaggcaaacagtgtagcatatccccactttggtaaaacaacacggacatttttatgtgtaagaatattagtgttttattctcctcagaatctctttctttttattcaaatttttaaattgggtatacttttttgtgggggaggcagagcatgggatgctggagaaatgactctggttatgagcactgactgctcttccacaggacctgggttctattcccagcatccacattcagcttataattgtctataattccattccagaggattttgtgcctactgtggtcacaaagcacactaacagtaaacagacaaacatgcaggcaaaacattcatctgcataaaataaaaacagaaatttaaattaaaaagcgggcaggatatggaatgttgtcagtgaatagagggaaatgctgttttacccagaggccagggaagaaggcttgtgtgaaaggccatgccaatagcaactcctatccatatttatttttttatttatttatcactgtgatcaaatgtccaagaaaatcaacttcaagtaagaaagatgtatttgggctcccaaattcagaagattcaacccatggtcacatgatatcttaggccatggcaagaaggaataaagctgttcatccagtgctggctttaaagagaaaaaaagaaaagaaagagagagagagagggttcaaacaagaaagagagggggagatgcagagagagatagagaagtagaaagatgagaaaaaatgagagggagagagagagagagagagagggagagagagagagagagaattgtctcaatatcccttttaagggctgggccataaattgtcaaatatctttgctgggttccacatcctagagtttcgagccagagttattaccacagggtggtgattaatcctgtatcttataagcctttgaaggacatttcagttttaaaccactatagcaaccacagaatacacgggatgcatgacacatagccttcttgtcaacagagctcaaagtcaagagaagaacagcagcagtggtgtgatgggaagaggttcaagggcagtttacagggcactaaaaaagtcttcacagtcaatgacaataagtgaagaagtgagtgatgagttggtactgtagttaccatgatgaagaaggtgacatgacaatttaaggtcactatgttgtattctttttatttagaaacaatcattttacatatcaatcctcccctcgttccctttatctccatcctcccatgccccctaccaacccaccccacacccactctgcaaggacggtgaggccttccatgggggagtcatcaaattgtcacatcatttgcaggagggcctaggcgcccgtctgtgtatctgggctgaaataatatcccttcatagggaatggggtcccaaagtccatttgtagacttcagataaatactggttccactgttagaggtcccatagcctgcccaggcctcctaactggctcccatattcagagggtttggttcagtccaatgctggttccccagcttgacaactggtgtgggtgtgctctcggtaggtcaggtcatctggttctgtaggtttctccagcaaggtcttgactgctttggtaattcctcctctctctctacaactgggtttcaagagtgtggctcagtgcttaattgtgggtgtctgcttctgcttccatgagctactggatgaaggctttcagggggacagatatggtcgtatgttggttccccagctatcatattggggtccatgagttcccactttatcaggtcagctgtttctgcagattttcccagtgtggtcttgacccctttgttggtcactcctccctctctgaaactggattccaggagttgggctcagtatatagctgtagatctctgcttctgcttccatcagctactggatgaaggctctaggatggcatttagggtagtcattattctcattataggagaagggcatttatggtaacctctccactattgcttaggttcctagttggggtcatccttgtggatctctgtacaattccctagtgccagtttcctctttaaacctatagtggctccctctattgacgtgtctcttttcttgttctcctctattcctctccccactcaatcttcctgatcccttctgttctctccctgcctcttcttccctcctctttctcctacctccctcccccctcccccatgctcccattttggtcagggcctcttgtctttttggcttcatgggggattgtgtatgtctctcttactgttatccttgtttccttgcttctctggaagtgtggattgtagaatggtaatcctttgctctatgtctaatattagatagatataatattatctaatttttcactctgttgtattttataatggaaagaagtcatcagaatgctttggcaggtgattcctcaagacaagaaacacatcttaagataatcctaccatctgggtagtaaggcagcttttagtatctatcctattaattagggccttagagaccagagttagctgtttaaaattaaatacaaatgtgtttgaatgtcattgaagttgtgtaaccaggctataaaatgttttttatgttgtaaagtaataatttcagatggtatctggataataactttatgaaatataaagagaataatgaggaagttattttaattgtctaaggaaaaaagtcatggtttggggtaagaaattgatagatgatatgtttggatattgtgattaatgatacaaacaggcttgatggaaatacaaatgtatccattatgagaaaagggaatgtgaaacacaactcagtcttcagtgtatgaacagttatgggctgattaattgtcagagataggaaagcctggtggaggagtttatgtagatatagggaagtcaattatttctctttgttttggctttttgacatgctaaatttgagatgtctttcaactttcagatgggagcatggaaacctatacatatggatacctaactatatagggaccattaggaatatttgggagaagtaaattatgcaataactgataacttcagttctttgctttatagatgtttggggcccataaagatggctccactccatcttgactaaaggtcagagagttcaaaactgtccttatacctataagattaggtttggctgctgtaggatgtttcggccttggtagtggatgtctttatctgaataataacagacctggactcaggtgtgtttactcttgaccctgaagactggatggcaggtgtggctatcaaatacctgtaagattaagggaagtaagtctctttgccccttatacatgataatagaagtcgtgtgcctttgccccactttttcttggctacataattatgtattcagcattcagcattcagctggactgaatggccctcttgacaatattcccttgtctctgttttgtctcttaactcccttggctagctagcccttcttggtccacactcttcctctcaggtatgaactgtggactgcctggtgggctcctacggcagcctggaaaagacagcttccaacacagatgtattttagaatttagtatctagcttcatgacatcaagtagaaacatgggaacaggtatgaaaagaaatgttctagcctggaccatttatttcacttccgtatcagaaccccaatcatctctgtttctttctgtcagtgtcggttgctagttctgcagctggtagttaccagtgttatgtatttatttaaaaggaggaaaagaggaagctttaagatgagacatgttaactagtttattatatggcctggcagagtagggagactaagagagaagagggacagggttaatggcagagagagctcgtagatgggagaagagcagagaaggagtaagcagagagagagcataaagagaggaagcagagagagagagtgaaacaggaaagctggagcttttaaagggaagactgcacatgcgcattgaggttccacgcatgcccagagtcctcatgcatggcgggcgacatggtgatgatgtagcacgatgatatagcatgttatcttgtgcgtgccctgcttgttgtcagggggcagggtctgtctcttaaagaggtagagccgatcagcatcaaagcctgagcctttcaaccagctctgtgtctgagaatgaggacaacttacagcacccagtccaactgattcaaagaaaaaaacccagaaaatttgggaaactgacttacctgctttagtttcctgaaatctgggagctatttgttattgcgttatagcttagctcattctggacaagatagatataatgctacccaaaaaagtaataaataaataaataaataaataaaacagagtcgccaaaagagtgaatacaaagagagaaataaaatgtccagaggaggactaaagggcctgccttggctagctggagagagacaggcaaaggagtcaggcaaataagcagactatgggttacttatttattttaaaaattgctattattactattactgcatatttttgtttcaattgctacaaatttgattaaaagattctcctttaggatagaaaaagagcacatctttaaatagcacgttatctgattttagcaagcatttggttatataattgtgaaactttttttataccagaggaagttagttcagcttacaatcttcctgcctctattctccatggtctcttctgaaatggattagaacactgagtgttgcacaggtgaaccaaggctcacccagatttcacctcagcagtttttgcagtatagctggaattatgccaaaatattgtagcctattttcttatgtggtatagtccaataaatcacagtgcagggaatttaataccaagtgcacacaaggtttgaactgcatttcctattctgttcatcgcaaagtcatactgtcttattttaactttactttgtacatctttttggatgattcccataatttcctataatatcaattcagagcagtaagaatttcagtgtcttcaagcaataattacctttaaatgttgggaatgtcatactatctacggttctatcatatagtcatgttactatgctaaaggagggctggaataatccccccagttttcagtgcctcatattgaacgtcctccattccctctccatccatccattttagtctctactacatggcctttttctgagtcttctctattaatttccagtgatgagtctgagcatgtcatatttgtatttttgtgtcttagttattatatttgatagtttcatccatgctcctacaattttttttctgttgttattttggatggaaagcattgtattatttataaatatcagatttctttcttcattcatacattgaagggcatctagtttgaacctgtctgttaggtatagtgaattgtgctttaataaacatgggagtacaaatgtcttttagacataatgatttcatgtctttggctatatattcagtggtgggattgcttgatcatatggtaattctatttccagattctcttttgtatactgttttgcataatggctgtcattttttttctttctcaattagattatataccctggaactttccatttacatgaacattgggttatacagaatgatgagtatttgatgcctgactgatacactattgaaaccttgacattgagcatacatacattcatacatacatacatacatacatacatacatacacataaacatacatacataccataatcttataatttcagtataatatgtattgcttttttaatttttactgcacaattagtgatagaaaattgttgctttcacaggtgttgattacaacataaactaatctgtactagtgagtaccttccatgtcagctgagaaatactacacaactgtgcatgtgctgtcttgcaccagtgttggcttcacttgtacatgctatctttccaactgttctgcacttcttgagcaaaaacagcatgacaacgttgtcttaaaatgatatatttgaagacaatatgtggttttggaggcaaattcctcttaaaatttctctcctgaggtaggactgacaaaaatagccttgcagaggtgaccactgggtaagccatgcatgtttaacatggctaagcaaacacagacaggagctgacaaccaaggcacaacactctgctcttcccatcaagatgcaagttttcttttgacaaccattttaaaaggagctcaactggaggggttgcagcattctgaaaggacaacagcgtttactgtctgaacataacccagtcattttgctcaggtttctttctccttaaccattctcttatgggacagaggggctaatgcctgcttaattgtgtgtgtgtgtgtgtgtgtgtgtgtgtgtgtgtgtgtgtgtgtgtgtttgacgttaaagtcaaacctagaaagaagtgttgggctcaaaggacatagagtactaagactcaggacaatgattttgtgggtggagagtgataggtagcacaaagactaagcagcagatgtgactaaaaacttagaaaaaggggatgggactggagagatggttcagcatgtaagaacacttactacttttgcagagcacactggcttgattcccagcacccacatggtaggtcacaaccatccagaacttcagtttgggtgatctgatggccatttctgaactctttgggcaccaggcatactcaaggcatattatcataccttcaggcaaaacattcatatacatgaagtaaaataaatattttattttatttagtaaagatgacaaggataaattggccagatatcagaaactagaattccattctaggcgtctacaggtatatatgaaatatggcatgtcttttaaactttttgaaccttacaaaagtgataagacaagaaagggagggatgggaaaagagaagacaatctacagggaaaattctattattcattcaatttgcaaaacaatatgtcaatttacataacaaatgacaagcatttttctggttccaggtattaaagtagtaaacaacataatcacagacctgatctttgtggagtcctaggtggggaaaccttaattaaacaaataaattaataaggcttgtgagagacagtgataaattggctcagcagagatgtaaattgagtaagatgcataagggctttgagttacaaaatctttacctgttgcagcagagcaaaggcctgcatgaccagagctaggttcatcctgaggagcttgaaatgagagaagtagcaggaccagggttgggagaccttgaaccctatgaggatgggtcttcattcataaggcagtaagcatctgagaagttgggaagcttaccacatgatggctcaacacagacactgttcttttccattgaggtgtttggaatattgctccaagtgagattccatctaatttttcagatgtacagatatgagattgcaatccaagaaatgatgtttacattctctaccatggtatttaaatactgtttaggtatagaaatgcatgggcagtttttaaatagctctgatctacacaaaggcaaaataaaaattggtattattgttgttaccactatttcttcctcatggtgtgaaaactgatccatagcaccaagatactaccacattaaatataatggatgattatttctgtggtatgttccttatggaaccatttgtgtttcaatttttaggagatagttcttttaaaaaaatatttaattttattttattgcatcggtgctttgtctgtttgagggtatcagaacccttgcaactatatttacagacagttgtgaactgccaggtgagtgctaggaattgaacctagtcctctggaagagcaacaagtgctcttaactgctgagccatctcatcagccccaggagatattcttataatgtctgaccaatcggccctgtcttgattgccagagatacaagtatgctacagggcaacaaacaaacaaacaaacaaatcccccaaaagacgacatgtgaactcttaaaaattaatgtctagtagccagggtatgtggtggggacatttaaaaaatactcctaattcagagttagaaattccttaattaaccaaagtgtaaaccacaagtccactgtagagatgagttgacatgggaaaaactgaagggaggtatatataattcaccaagacatctgcttttggggcttagaaactttgtttaaactatccctctctctgatcccactctgtgaggcaatagccagaaactgagccctggagaactcaacccaattgccagggtgacaaaatagctccaacaaatgggaattaaatgagaaggctattgaatagggttctctgaagaacattggtctattcgataggggcatagggataccaggaggaagcagcattgtattcagattgtctgaggtctctgtagacttacttgttaggaagattctccaaacagtacttattcttctcagtgggcatttcaaagcaaaccagaaacagataacagggcatgcatcatgcaagcactttccttgaatccaaagacctagacagctagaaagagacttcaggacaggacttttctccttacacagtcatatgatctcagcttccgacctatattaggaaggaggaagcattcaattcacactcttaaaagaacaatccacagttgagtgacagtgtagtcactaataataattgtggctttgtgttatatttgtcaactccagctcttatttgtaaaggggctaacacaacacgggattagatgatgtactctgtgatacaatgtaggttttcagtgaagtataactactaatattagtcacttccattgactttagagttagccaaaattaatactttaaatatctgaaaacttacaattatcatctgtttatattaaagccattgataaaatgtattgtagttaaatctgccaatttcattcttccagctttaaaaatatatgaaactatcttataagggacaatcaatttcattaatgcttaaaataactaattctgtctttagggaaaagcaaagaacaaaattagtggtatttacactgcttccttttaaaattgtcatttctatactcatattatgcatcaaaattgagccaatttaaccttacctctctttttttttctctctctccccttcccccagttctatccactccccttggagtacaaggtcattaattgctattgggaccttcataaaccctagtctgccgacggggtgagaactctgttgttaaatgtattatggcaggaatgtctttggagattgcctgcttgattgctttgcaaaggcccaatggcacacagcaattaaaatccatagacctccataacccctctgatgttttatggggctttttgtgtccttcggtagagtttaccatttgtgtatttcccactggctctctctttcaaaactctaagtgggatttgtttttttatccactgtgatgaagctagttatacatcatgtgaaaggttaatgaatattttcaaaaggagcatatgtttttaagtcataggtgaaagttatactagaaactggctgtatgaaaactaatggtatttttttcccttaatcacattagagttaatttctataaacctcacaaatgcctgtgattcctaaataaagcagaactcatatagcagttttcaacctgtgggtcatgaccccttggtcaaacatgggtctccaaaaatatttaaaataggaccaacccataatagttggtaaattacagttatgaagtagcaacaaaaatgatgttatggttagggtcactgcaacacgtgaaactattttaaaaggcagcagcattaggaaggttgagaaccattggcttataagattataaggtgttaaaacataagggagtgtcttgaattcctactgtgagcagcttcacagaaatagctgccattcaccacacacacacacacacacacacacacacacacacacacacacacacacacacacaatttcaatggcattagaacattcccttgggctaggtctgatggcacacacctttaatcctgacacagaagcagaaacaaaggcatgtggatctttttgattttgaagtcagcctgctctacagtgtgagttccaagacagccaaggatacataggagagaccctgcctcagacaacatcaaaaaggaaattgacaaacaaacaacagcaacagagacaaagaagatacacgtgagttgatagctttgggagtgaatgcatctggctcttctgcagctgagagaaatttggtatcatcatagcgggagctggcaaaagagcctcccaggaggcgcttcaggtcaggctgttctgaaactaccatagcttcagggacccttcagtagctcttgtgacctaacagtgacaccattaggctactttgtcatctgacactccattactttttctcaacacttctttccttaatgatttgctcattcatcttaacttgcctgcactccacacacatactcaaacgacatctaaaagtcttcgcctaaaactgattggcatgtttcaaaagcaaactattcagcatctagacctcttagaaagagaagaagcatccctgagcttcagaaactaaacactgagctcatagtatgctctgcacaaagccccacttcccctggccagaaaaatggttcagtgcataaaggcaattctatcaagacagaggaccaaagtttgaaactgagaatcacatggcagaaaggaggagccaactcccacattttgtcctctgacttccccaggtgcactgtggaatacacacacacctgaccaaaaaaaaaaaaaaagagtggaattttaagagaaacatttaaaaattttttaaaaagctaatatatcctaaacttcaaaattcttatattttgtgtaactgacaaacatgaaaagaacctaagtcccatgcattttcagaatcaagctctgagtaaaattatgtgcactaaaactagaggaaagtgattattcagagtagatagtaagggagggaggaggatgaatacactgataagacactattatttaatggaaagaggaccagatcttaatccccaccaccagatggtcacagatcaacagcagtaattctgtaactctttgtctagcttatctattgatggatctgtgttgttatatgtttttaaaatggtgtgtttattaaattctaatgttttttgctttatacatgatgtcaaatttcaacagcttaaacagcaagcagtttactccagttatcacccttcttcacagttgtgttttcaagaatccatgtttttaatgcatccggatcatgtattatgtttctttaaatgatagattcccaaaggtaattttatcaccaatatccaatatccacttaggactgtcatagcaatgtgtacctctaatctcagctctggtaaaaccaagatggcaagacggtaggaaaaccctccccaccacacacacccagggctagcttgattacccagtctagtagattcaacaaagtttggatcctaagagattcaagattctttgtgtcctggttatttatttatttatttgtcaacaagacattaagttagaatcatctagaaaaaggaaactccactgagataatgtctccatctgattacctgttggtaagtttgatggccattttcttcatttatgattgatatggaaggaaccatccccaattgggtagggcccaattgtctttgggttttatcactgtgaagagatactctgatcatggcaactcttacaaaggaaaacatttatttggggctggcttacagtttcactggtttagcccatgatcatcatagcaagaagcatgcaggcagacatggtgctggagaaggagctgagagttctaaatcttgatccacagacagcaggaaaaagactgtgccacgctgtgtcttgagcatatatgagacctcaaagcttacctccacagtgacacacttcctctaagaccacacatattccaataaggccataactcctaataatgctactccctatgagtcaaacattcaaacacatgagtctttgaggccacaactattcaaaccaccacacaaatcctgggtagataggctgggatcataaaagaaagctagctgatcaagccatgaggagcaagccagtaagtatcattccttcatgggttctgtttcatttctccaatccaggttcctgcctttagtgtctcccccaaaggattataaaatgtaagttgaaataaactcttttctccccaaattgctttggttatggtgttttatcataacaatagaaagataattaggatagattctaaagtactatagagagtaattgagaaagacacacaggttgcagacaaacaaatgcatgccaccccactcccccacatatgtatatacacatggatataaccacgagcaaatacacacacacacacacacacacacacacacatgcaaggggggagggattcctttctctctctcttaattgaaaatgtagaaaatctgctctacaatttaaagcttcaaacatctttattcaatacgttgttctggaaaatgttccagggaatatgtatgttatacttggtcagtatcacttatttaaaatttactatattctggtcaatagacttcattactattaataagcaatacccttagtattctttaattgttcatcaaatgtaatttgaagaacttaatatcctcaagctactgaaaattatgagtaaacaataccttgaggttaacctgaagaggggttatgggtttttactttctcctatttttttcattttgtggttttaaatgttcttaaatgaataatgaataattaagaaatacacatattaatcattttgtctacatataataaccatatgtgtatgcttattactatacatacattcataatgtggatctagcattatacgtttctagtttcaaaaatgcatcctttgaaaggttcattttaattacatagtgttctataaatatacatgaatttaccacaattatattaaacatacaaatacaatatttagcaatgtaatgtgtaagcagagtgagtgaactggtataattttatactacctaagcatttatttttagtatagattagatgttcaggatggtttcctgtttatgcatcatccccatcttgatgtggtttgtctagagatgcttatccaaccagtaccctatgaaacagctagatgtgacttactgactcaagccagtggctccaataccctttgtgggatgttggaatgcccatatacaccacagtcacaatcttccagtgataacatgactctctttccacagaccccaataattagaagtctttctggaagactggtttgggaaataccttgagcctgagtggcagcactgattgatatacaggccattcagtgcacatttcaagcatagatatctatttcccatcagtccagctagactcataatggtcatagtgattatcatatgagtgctgccaggcctactttcactcttgctttaacattggtaatgaatattccccatgttgagcttcacctgattttaaagtgttaatttcaaaggtagtcattaccagtatgcagtatcttagaattgataatgcaaatgaaactaaaattattgtttttgttctttgcagttcaggtggtaatggaattaatcaatattacagtaattcaaatccaaactattgattttaattaaaaaagattcaattgaaaactttacataaacatataaaattacattatatacagaacgcagattgctggcatccatagtgtatgtgcaggcagtctgcatctgtatctatatcaaggtgacagcatgttcatttaggtttaaggtttttttctaccctgcatgaaatacttaacatttgttgtcctgggacaatcatctcaaatgccaggtcccaaaggaagtaaatgcatattcaaattctatcacatgagtttgaatatggaacaaagacaacagaacactttaaaaatatccatctatgtatggtatatgtgaagcaatactctatatggaatagtctacatctttaaagaaatcaacatatttaaaaactgaatgaggaatttcccttttatgtggccagttaaggctaaaccaggttctggttacttttcaactcttcattaggctggcatttcctgtgtaaattctttcctgtgtaaactctttcctgagtcattcacagacatcactgcataatttctaaatgtgttaacttctaaatttatgggcattttattgggtaatatataatattcatttagataatcagaaatatctatatatatctatatatatctatgtatatatgcccatgtaattaataaattctataaaagtataatacagataagctacatctaaatgctgttcaaaggcagatttgtattagaataagtcttcatgaggttccttcccactcaagatgatattctctttttctctgtgttacagaatatacttaaaatatggtttatttcatctcctgtcaactagtcatgcaattaagactagatcttttacacaatagtcagatattgtattaagtgggtttagctcattactcaaaaacagataatctgcatcttaaatttaggacatctgaggaaaaccaccacatttgttttaagaagctaacatatcattagtacccaaactagataagaacaacacaaacaaaaacagatgaatgccttcattgtgcaacatcataaacatccaagacagtgggcctcactattgtgtgtgaaatgaccaccataatgcacactaatgcatgtaataaatggatcaatatttaaattatcaagaaagcaatgatacccctagtgaagtacacttattaatagctacattttaatgggattcatctgaattacaagttaattgagaaaagtatgagtattggacatgtagagaaagttaagattgaaaaacaggtaatatttttaatatttataaactgtttggccaatggctagagcttcttactggctatccatctcttaattattaacccatttctattaatctaagtatttccatgtgctcttggattacctggtaatgccccagcatgttactccttctgcctctacatggtgtctttctggtggctcctgtctgccgtcctgtccccaaccttccccctggtctggtaacccacctatgctccctgtctagctactggccaaatactgttttattcatcaacaaataagagaaacatatatacagaaggacatcccccatcatctcctcttttctgtctaaataaaaagaaggattttaactttaatatagtttaattatagataacaaaacagttatcaagtaggaattatagctaaaaatatttagttcattaacatttggcaaagcataaaggaaatattctctcctctatcctatctttgtaagtctaaacttttatatgtagcttgttttttatcatagctaatgaaaccataaacatctatcttcaactccatcaaagaccacagaagttttgaagaatgtctatccatatgaaatatatctttgtatatctagaaaacctaactaacactatgaggtttgactattataggtgactatctgtaatctgtaattcattatacattacttttttggtgttttcaagacagggtttctctgtattgttttggaggttgtcttagaactcactctgtagaccaggccagcctcaaatgcacaaagatctgcctgcttctgcctcctgagtgctgggattaaaggcatgtgccatcaacacccagcttatacattacatttttaagtgagcagtataaacacaatacctaaacaaggggagaaacatacctataacaaattgaccttaaatttgtatcaataaatcaaaatccataccagtacaaagtattcatttctatattatattccccaatttttctttagaaggagattgactggtgatcataaaccatttattattcatcccatttgaatgaaaacaaacatttataaacaatatttgggcattgttctccccaaactgcttcctgctgtttgggggcactgtcaatatcatggggattctgatctggccaaatcctggctgtactagtctgaggctgcatcatctcagctgttttggatgttgaatcacctgggccactgcttcagagtcttgtttgatcaaactgtattagtttggaatacatagcacctgttttccaaagtaacatgtctttagacttaaactatgaactcaaggcattttcaaaatatataaattggattaatccaacaacatttataatgaaatgtcttttagcagatgttgctctttcctcagcaattcaaagacaacacgataatatacagtatccggactgtgtattttctgtctttatgtggcttttaaaattattatatttcttttacttttatttttccattttttgaggcatggtttctctatgtaactttgactgcccttgaactcactctgaacatcagactggccttctaatcacagatatcagtttgcctctgcctcctgagtgctggaattaaaaatgtgtgccaccaaacccagctattctatttcttttttaaaaaggactttctatattcttcttcttttctctcccaagcctacatatatttttaaacacactaaaacatttagaggttttttttccctcttaatctgtcttaactgtatatctctacttatttctgaccacatgagtcttttatctgctaaacaacatgattaaattaaagaagatattttagcgactggatttccaacatggaaggggtgcattttccaccagcactgggagctgagctcactaccttgattattgtctacactgccatcaagcagcttgtagcacactgctcataaattttttttggctgtatgaataaaagctaaatctgccatgcagcatgctgtatggcttggagatgtggtggtcactgctgccaccaagaagcatgcttgcagctgcttatatataccattcaaatgtttggtagcaggggatcttaaaagagccaggtggtttttgccaataatgctgagtcaggaagcttctcttaaaggagccattagcctctgcttgcctctagcaaacagatcccacctgaaaaaaaaaaaaaatgctgctaccaagaagccatgcttgactttgttctattgtttttagaatccctttaagggctttttttcagtttttacatggaaattctagcctaacatgtaggtgccattctgtagaggaaagtttctgttcttcctggtcctgcagcagattaaccccaaataaacacacaaggacttacattacttataaattgttcggccaatggatagggcttcttactggctagcaatctttgaattattaacccatttctattaatgtaagtatttcacatcctcttgacttacctgtaatgtcccgaaatgttactctttctgcctctacatggcgtctctctcaaaacaagtagatttaaaaaaaaaaacaaaaactaattttctaatacaagtaggatgaaactcccttataagggcaaaatatttgtcacatgaaaagaaactcccatacaaagttaatgattgaggctctacaaccaatcacatgcagactggctgccgaacagtaattatttggtttttagcatgacattagaagtcctagcaagggcagtcatataaaacaaatgtataaaggtataataattggaaaacaacagagtctgtgtattgtctattgggaaaaattcatatacatatcaaagtcacatatacaaaactgcatgtccagatgaatctcggggagattgtggggagtacacatgtatgcatgtcaaattttatatctgcatttgtatttcatttctatatctaaatcttggccacccataaccctaggggaatatctaaatttgaaaatacatttgggtcaaaagtaataagaatgattaaaataaatttaaggaagaattcaaaattctataaacaaattgcttaaaaaacataaaaatcactatagacagaaatgaaactataatgatcgattttacatagatctaatccacttaatcattttcaataaacatcgaaaatattgctcattatgtttacaagctatttttctttttaaatttaatttagaaacatgcttgttttacatgtcagtcccagttccctctctcccctcctctcctgcatccacctatgactggaagttttaatcagtaatatagaaaaacaactacaatatattttggagttagtgcaaggagaattttgttgcatttattttaagtaaaaatgattatgaattactagtaagaaacaagtagtaccatcaagagaggatgttaggattgtatagagcgcccagacatacaaagcatatttttgaattaagcttattaaaatagcataataatcaccctaaaataatgaaactttcaatgattaatccaggaactgacaatgattacaatttttctgcatctgattctataaatgaaaaaaattctatctgaggtaaattataagaaaggatattacaattttcaaattcatagaagacatgtttcatttctctccccaatcccttcatcccttcccaaacttggtctccagaggaaggccttacctactctgtggagtaaatgggggggggggagtaagggtgagaggaggggaaggcagaataatgatggaggaggaactgggattgtggttggtatgtaaaatgaaaaataattttttaaataaaaaagaaaaattcccctgaaaaaagaaagaaagcagactaagcaagccatgagaagcaaatgaataacactttcccagtctctgcatcagctcctgcatccaaattcttgccctgtttgagtttttgtcctgacttcctttgacaatgagcagtgatatggaagtataagccaagtaaattctttcctcctcagcttgctttttgtacactgtttgattacagcaaaagaaacattaactgcggcagaaaaatccattttctttttttctcacaacttctcaaatatgactacagtcactgcgtagtggtcacattctgtctccaaatttacaggcagtaaaggaatctctctttcttcatcacacataaatttatttcatctgggaaagattttacctttttaagaattcatctaattatcttagagctatctgaaaaatcaagaataatcttacattctcaacatacccaatgagaactatgaaggccctttggctatgcagagcagattacttagggaactaggaaagagaaagaggtcattattcttccaatcactagttggaaaatcatttttatctgaaagaaaaaatttgtccttaagtaaacatgaaatgacaacaaagcataattggagaagaaatccacaaagttcactaaatggcagagagaaaccaatggtgtcatggcaacacactaaagaaaagcaagcaaaattatgaattaagtgtagtatattatacctggataaaagatattcataaaaaagatctatatattaccattaaacaacaataactcacatgtggtttgtgagagtctctctttcctgctatgaatttgtgggatgagaactaaaaggtaaatatgttttagacaattgaatttcaaagaaaaagacaactgtattgacataaacatggcctaattctattctatcatactaaacacttggacaactgtttacaaaattttcttatactatgaaatattttaactaaaaagactgccccagtcatattttaatgttatttgacagcaaaattcaatgctgataaaataccaatcaaagcatctattaaaattatcaaaaggcatcattattaactttatcacatatcctatcaaatggcaaatcataaaaaaggaaaaccaattagtaagttgcacagggaaaaaaaaagccaaatgaatactgttctgttcagaagtccttacctatacctatagcttgtatttcccatcgttcttcttgcagttttaatatgtcagactttatattgatgtgtatatgtacactttggagttgattttgtgaaggatgtgtgatgcaggatgaaattcagagttgtccatttgacttcatctagaatttactaaaatccaaagtgctgggcacatctgtgaggatttgtttaattaaatcatttcaagtgagaagaaccacttataatctggatatttgaaatacatcttttattcagaatttttgtggtaggaaaatccacctttatctaggccataccttttgctggtagcttatataaacaatatggaagaaagaggctcattctcgcttgggattcctgtttgtaatgaaaaccagctgagacatccaggattcttggaccttccacttgtagacagccattgttggacaaggtggatgacaacctgaaaactactctaataaatccaaattttgtattaatgtagtatatatatatatatatatatatatatatatatatatagatgctgtacatgtaaagtactatatatatatacatatgtatgtatagattcataatttatgctctgttactctagaaaagcagtttcaacctgagggttgtgactacatagagggtcaaactgccctttcatcagggtttcctaacagatatcatgcatatcagatatttacattacaataacagtaggaaagttatagatatgaagtaccaatgaaataattttatgtctgctggccactacaacatgaggaactgtattaaaggatcacagcattatgaaggttgggaaccactgctctagaaaatgctgatttataaaatgagagataccggtatttaattcccctagcaacaatgtttgagggtgcttccttttctctgataactgtttttgacatccttgaaaatattgagtggctgcagttgcaaggctagtatctgtgttctcaactgtgtttcattaatttatctatatacttcattgacagtagtatgctgcttttgttgctatggctttgcaatgtagttttaaaccagttatgatactacttccaaacctactcattttccctttgacttgcttttactatccagtcttttcttttacactgtatgatttgagagactttatattctagttgaacaaactactgtgctagcattttgattgggagtgcattgaatcaatagactgccttttataggatgtatggccaatttcagaatattaattctatgaatccatggggttgagaggttttgccattgtctaatgtcttctttgatttcttttaaaaacatttattaattttattttacattgaaatgttcatacataaattcaataaatctttaatatatatacccatcccaatttcctctccaaatcccccagttataactgaaacatctccttcccaacttcatagcctctttttgtgaatgtttcttatctacattttttcaagttttaatcaattgacttcaatttatgaggctcagatgcatctggttgttggtctttaaggtcccttgtgtgtagaataatgttatgcactaatatggagtctttgatttattctttcccaatttccttccttttatttccttctctctcctttttttgtgccaagattaaagcttgaagttctatattgaataggagtttggtcagtgaacacctgtgtcttttacccaactttagtgggaatgcttcaaaattttctcctttagtacactgatagttacaggtgtgccatatacagccctcattatgctgttattatgctttctccatctttaaactcttgaggatattcatcacgagatgatgtggaactcaaatcccttcactaagttggcttttacttgccagtcactttctctttgtagtgtcttagagtctctcttaatttccgatacaccttggtagaaacatggttgtacaattttggtagaaagacactgtttctctgtgtctacagaattcatttgtttctcctcttctacattaaaggctattttgttagaagactttatatattaatttatccacatctctaaacttgtaaaatttgtacagtgaataatgtgtaacatgtttcctaggtttgaccgagatggtatgagttattaagtgtatttcataagtataccttggatttttgttgttattttgctttgtttttaacctaaaacaaagaactggtataaaaattaaaatgtttatatgaacacccaaagacattaaacaatgtaaatatccttggaatagatcaggaaacaaatgagacagtgcaagtgagctcttcattgttattgaatttgtcttctcttgagttctgtaagaatttattaaagatttcatgtagcaatattcttcccatttcattttagagaatactaaaattacacttttattttatataatttaattgtataactcattcatttgtaggtttcaaacattaaaagtgtggggaaggtatctaattttggagtcaccatttcacctatctgccagataatagaacattagcaagaaaggtataacttctgattccgttagaaaagtctttgtagagacagcatttcatagagaagcttgaaaattacttgaaccagtagggattttggaagaagtagacgattcaaagaaatataatggtgaagatatcctgtggccaggcagcaatgataaaagggtctcctttgaccttgtgacaatggttattgattatcttgtgataaaaatggatagctgtaattcttaggcacttaaatacatgtttccaagctacgtctacctttaaaagtgtcctgtatgtgtgtccattccaattgcttaaatttcacagtaattaatgacctctgattcttttcaagttgtttgtagtttgataatgaatatgtatatacatcagtaacagtggcagtgatgctttaaaaacagctggccttttatttgtattagatcaaatgcattcaattattctcagtaagatcatgatttctaagggcggtatttgggtctatccattttttaatcaaggacaccaacacttgctctaactacactcataattatttgataatgcccaacaattcgagaaatagattgtggacaaatgacccttaaatcttttagctagatgaccctccatcttagcttaatggaatgatcaatgatgctacgacaaggcttatagacatcagacatgaatcactattttgatgggacggtttcaaatcaaatgacagggcaagtgttacttcagacactttgatgaaatgtttcagaaaaatcaataaaccttgaatttatgacccatagctttctgtagaaagatgattatctattatgaggctaaaaaaatgtcaattttctatgtctctaaatcaaaagttaccatgaatacctacagtccatgatgaagtttcttttaacaacaaatggtctatgatgaggttatgcaatgacttgcaagtagagaaataaagaaattaagtgtataggatatccttgatttattttccagtggtcacattacagtttattcatggtctccctcaagagtcatatattagtgtgaagtacatacttatttacatatgtgcataaaataatataattgtacctgcacaaatataccacattaaagatcataactatctaaatgtcctgtaggacagacatttatacaacattctatagagctatgtgaatttggagcctggtagcaaatgcttaaactatatttgtaaatcaaacaaatgtgtaaatcatctatgatttatgttcaagatgtatatgaaagtaataaaaataaataaacataaaatcagagtccatggccaaaggaatctagttacaaaaagagacaaagtgagctttagatgacagtttaacaaaaacgagtccaattaagagatgagaggccaggcattaaaggcagaaggaaaaacatgtgctcagagaacaccgaagcaggaaagaatttaacaacattgaaaattatcaaagcacagcatagctggagaaaagagagggggtaaaaaagacctaaaatgaaattggtgctgtctagtgcccagatcatacagttccttacaaagtatagttaacagtgtggattttattcttaatgcaatgtgcagtcactgctggcttttaagcatcagagtggtggcttaaataatcgactctggatatcatgtaatgacagcctaaagctgagatagagcaaaagtggaaatagaagttgggaaatgttggcatcagtccatgaagacattacagtgactttacagtgatgacagaaatggaagtagaaactgatagattcaaataatacctattggggcaaaagttagaaatcaatgaatattaagatgtttttataaaaaatattgttaaataagcaaaataatgtttgtctattctctaaagcatcacctaaaaaccatataaaaatcatgatatatatgtctagaatgaactttgtaaataggaagagaaaccataatttatgtacctaagggtctaagagcatagaggtccttatttgataattaaaaagtaccagatttataatttttcctttctttataatatgtccaaatgcttcagaaagcatgcttttaattaatgaaacaacttcatatgttttgcttataatatttaaggcttgaaatgatacttatcttttggtgattgagttttattgtttgtatatgatttaggttgtgtccaaagtctgaaaccccaaaatcagcaagagacccatttcaatgcaaaagcagagagtcttttattgctgttgtttaactccattagctctggcccttcatccatccacctcacagatggctggagaaaaagaccctgagaaaccacgaggcaggcatcttatagggcagcctaaggggagtgtctagtctcaggattggtgcacttccagtcatggacgacctgccctgtgttgatgggtcaactggttgttatggtccataggccctcccagggtgattgctatgttctgcacctctgttgtgcacttgtctgtacagcacacccagagccataaagcacagccccgccagctaacttctgattggttccttgccatgaggagggcatctgacctcctagtgaccaggacaggaagggcaaggtaggggaacacctattagcctgtcatggctgctaaaccaggggcctggcctcttcatttataataataataaattgagctgtctttttatttttaatttttaacatggttttaattgaaatagaattgcatccctttctcctaactccttttgtccctctaggccctcccagctaaccttttttcaacttcttccatatctccctctactgtttttttttaatttaaattagaaacaatttattttacatgtcaatcccagttccctctccctcccctcttcccatgccccctaccaactccctatcccaatcccctttctgctcccaagggagggtgaggtcttccatgggggatcatcaaagaatgttacatcttttggggcagggcctaagacctcccctatgagtctaggttgagtgagtattcctctatgtgtaatgggctcccaaagtccatttatataccagggataaatactgatccactaccagaggccccatagactgcccaggcctcctaactgacacccatgttcagggaaactgtctggctggggtccatgagttccctcttgttcaggtcagctgtttctgttggtttccccagccttgtcttgacccctttgctcatcactcctccctctctacaactggattccaggagtttggctcagtgcttagctgtggatcttctgttcccatcagctactggatgaaggctctaggatggcatttagtattgttgttacatgcactaaatctgtacctgtgtattcatatgcacaaatatgcacaggttttattgctagtgtttaacatgacatcagagataatctctttgcattggaaaaccaatgagagggctcaatcctgggagaggttgattttccttcccttggaaatttttagttacctgtagattttgtctagtagtatgactcgcagcaagtttttccttcctacatttacttatcacatgatagttgccatggttctgttcttgttaacagaggcattttaagagagactgtttcacaacagacatcctgatatcctggttttcgtgctcttagtatctttccaccctctcttccttgatgctatcagagctatgcattcaggatctgggatgtaaatgtatcctttggggctgagttcctcctcatgatctgttgatctctgtattcatttttttcaattgtggttttccatgatggtttctaattgctgtaaagagaggttattttatgaaactccttctttgtgagtataaggatattatgtagaatgtagtgaggaattatgctggtctagcaacaaagtggctgctatattaaccttgactccttatagtaggaactcttataatatggcatatgtatgaaagtgtatgaaaatttagttttatattaataagctttatatttctataacaaatatcagcaataatgttattattgagagaaaatgtttactttgactcacaaatttagagctctcagtcttgacttaagtctcttacttcaggcctaaagcagcatatcatggaaggaatgtggtggcacaaaatcaatccccatggcttcaattggagcaaaaaagaaagtaccagtgatatatacttctctgaaggatgtggttccagtggtgtaaagacttctcccaaggctctacctacctcatcaagatcccatcacttcctagtgatgtcatgtactacatatacagatacatggaacttcaaagtgaatttttttttaatgtttaatcttttattattttcattttaattaaaaacaatctcatttacataccaatcccagttccctcttctatcttcccattacccacaccatctctccattctaccccacatccacttctcagaagagggtgaggccacacatggggtaccatcaaagtctgtcacatcatttggagcagaccctaggccctcccccatggatctaggctgagagagtatacctcaatggggaatactgttcatgcaataggaataaatactggatccactgccagtggctccatagactgcccaatcttcccatctgacacccacattcagggggcctatttctgtcttaagcaggtttcttagctttcagcctggagtccatgaattcccacttgctcaaatcagctgtttctgtttctgtaaacttccccaggatgatcttgttccctttgctcatcactcctacaactggattataggacttcagttccgtgcttagctgtgaatctctgcttctgcttccatcagggaggaccctaagagagataatacatggacccttggagaaggggaaaaggataagctatcctgattaaattgtgagcatgggggggaggtgtgagggagataggagaaagaggagggaaaaatgggagggggaggagaacatgagggatcagcaaggtggagttgggtgaagaacagagagggagagtaaggaaagtgatgctttaatagagggagcctttatggacttaatgtgtcccaacctgcaggaagtcaacctggggcaagagagtcagggatagagaatggggacaagagacacagaaagaacgaccacaagacagggttctgatcaagtggcaaacttcacttttctcaggctagtttatatatcctagcagagcaggatatggggaagggtagaacgggttgtttgtgcaccaggtattagtgtaggcaggatattaggaagccacaaagaggatgtttggcagggtagttcatgaggtccaggaagggttgcctaggtgactgagcctgtgggtgtaggactgggtcaagttgttttttttcttgagctgaggttctaaggagctgttatgtaaaggttaatatacaattatgtggcaggccaagaatggtgtaggatctcatgctcagccctgagatttggctcccaacattaatgagaaatctggcactagggaacctcccaggaatccacaaggatgactccaactaagaatctaagcaatagtggagaggctactttaaatgcactttccctataatgatattgatgactacctcaaatgctacatagcaccttcaaggtgaatttgaaatggaaattgttgcaccttttgaattttgtaccttctgtagcacacgttttttgagattaatctatgttgtatgatgcatatatagttctttatttctctgcttagaactcctttatataaatattccacaatgtctttatctcttcactgctgtatttgggtttccaggtacatctttttgtagtgatagagtcatctgtccctacaaaacgtcagattatttcctctggataaatacaactattgaattttgtttatcatgtttctaagaatgatttttaacatcatagaaatttgttcactattttccaaaaagacaaaagcacttatatacccaactattgacattggagagttctggtgtctccataatctcaccagcattttataatatcagatttctttagagtggagcttgctgatatttatttgtttgaaaggattttatgagacaaaaaaatgaaagtccttctgtttctagaagactgagtcattctataatggcagtgtgatgattcattttaattctccacttgaaacaactcagaatcaccagtaaagtcctatgtgaatgtctgtgattgactgccttgattgtctcaattgatgtgggaagagccacactaaatgttgggagtacattctgatagtatacctagtcaattgatgtggaagaatgaatatttcttactttgatcctctcttggccatcattcttttttttttgagtgaaaagttttattagaaagggagggagggggaaggaaagagaaaagaggtaatgagacacagagacactgatggaggactcaggagaagagacaggagcagaaagagaggagataggagagaacagaaagaacagtaagagcagaactgttctttctgctcttactgttctttctgctctcttattcttctttttgctgtttctgctctcttcctggatgttctctctttttgctcccttactgttctttctggccatcactcttgaaagcaagtttatttacctcactgctgctgctgctgctgctgattccttcactggcagcttctaatgtggactggagatgagtgaatctcaacatatcctcctgatctttgccaacagattcaaaatactgcagtatccagccttgtggactgaacaactacctctctgttgtcatacttgttgttgtactactccacccttataatggaaaccaatctaatggtatgcattttgtcagttctgtggcactatgaaacccttactaatacaggtagggatacacaagcacacaaaatttcctatgaagtcacaatattttttctgactaccaagaattaaataaagtcacaatagtgtggatataattagcttgcacactgggaaacatttggtgaaagatcagaggtcattgaaaaagtcaacctgattatgacaacactctgttacttgctgggaagttcattccattataaattcaacacccccatcaataaaatgaagataaaaataatatctaccttacagccctactatggggatcaaagatttagtgtaagacagggcttttaaaaatgtaaaacatcaatttctgttattacagataagctgatttatgctaataagattatgttgtttctaatatctccactaagatatatgagtcagtttggtcttaaagaataaaatgtaaatataatcatttctatgaaaacttttatctatggtgtcaggtattttattaattaaaatacttactgagcagctacactatgtggcaagcatgagaacacatcattaaataaaataaacatgaaccttctttttaaatcctctagaaactgactgttcacattaaaaatcaaaattcagtgtagtgctataatataacatgtgttattgaataaaggaaagcagagagaaacattatagaatattaatgaaggagacattatgtttttaaatagtgttttgggataatagatttctaaaaaattctacaactacaaatagttgaaatatgaactatgtgggttatggcagcaatatcaatttagaaagaggtacacccagaattagaatatttttgacacatgctctaatacaacataaaaagagaagacgtcctgcatggagggaatcatgaggacaaaatttcttattttacacttcctgggcaaacatgaacaaaggtctatttcaccatagatagtgtatgaatagcagaccaaactaaagaattgcatcctaatgtagctcagtgacaaaaggaatttcactggacttttgcagaggaatgtaccataaaggtttatttacagaagcacatatggcccaaaacaaagtcccaagggctcatgagtgaccaccttccctcccagagtctcactttcagctaactttccatttcagaaacactccaaagtcttcctagatcacctgccactggggcgggagaaggcaaaaggaaaaactgtagtctcaggtgaggttattgtatcctcctacacctttctgtctgttagggtttgttagtagcaccagtaatattcccgtaaacgtacttaccactttgttgttctatttatttcattgccatggtggcctaacaaatgttacctttactccaaggtgctgacagcatgatcatgttaagcatgaaggaaaaggtcaaactacagtagagttgtaaaggaataaaacacacaagagaaatgtgcgtgttcacacaggaccagaaagcaagtaaaacaaggctttcaagtttacactcaggtacctagaaaactatcaagcaatataatgcatgtctctcacaacatccacatattttttttaactttcttattgttactgtagtaaatttccacaaaattagttgttgaagattatgcaaatatacttacttaaagttttttattattattattagttctagttagggaacaagcttatttcaagtcccttctccctctccctcccctcacccccaaacttcctccccacccccagccacccccaccccatccacccaccacttcccaggcagggtagggccctcaatgggggctctgcaaagtctaccaagtcttcctatgctggtcctgggcccttccccatgtgtccagggccagagtgtaacccttcatattggatgggctctcaaagtcccttcttgacatactaggaagggcctaagccctgttccaaatgacatgacagactttgaagatccccatggaaggcctcaccctcctgaggagcagaaagtggaatgagatagggggccagtgggggggaggggaggagaagagggagagggaactgggattgacatgtaaaacaatattgcttctaattcaaataaaataaaacaaataagaataaaatgtaaatgtaatcattcctgcaaaattgtaatatattatgtaagttatactattaagtaaagtatttactgagtacacactactaaaaatcagatatatgaggaggacttggtgtttttggcttgtcaaacctttagggaccatctgggtaagtgggttcacagctccatcctccagtttgaaagaaagcaatgtgcatctttaaatttatcacagacccttctcccatattttatgaatcctttgatttcacttatctaccaccttatccaaaattatatctataaataaattctgtgattcattcacactcacaatatccctttagtcatacgaagtagcatttttaaaggtcttaggattcatacttggacatctgtctcttacagtctatcacaggataatggtgcttttgatgtttattaaagggcaacaggaaatgggaacattggactgaaggaggacagcagtatttattcattgtctaacactatttggtataaaaatcagctgaaacttaaagggacatggttcattcacttctatattatctgacttacccccgaagtagaatatgaagaggagcagtttgactagatgcccttgtttaatagaaacaaaaaagttaagatttgtattggtttatactcaagtgcatatgagtattgcatgtatgaaagtgttcttggagatcagaagggagagtgctaagtcttttactggagttataagagatcataagctgaccaccatgcaaataaacttgggtcctcctcaaaagcagcacatgctcttaattcctgagccatctccatagctatcaaacaggatttttaaagtaccaagtgtaatattttctagatcaatccactatctgaatatttcataatttcattttctttatggatgaatagaatttaattgtgtctgctctgtacaatttcattattgattcatcaactgatggacatttaagcttatttcttaggtattgtaataaaccagacccagagagataaaaaccacatttcctgtgttgttggtggatactacctctctaactgtttgagatttaacttgaagtaactgaagaaatcaggaaagcagaaaaaaataattggagaggggtaaagaaacagctgtagcagagggttgagtaggacaaaggtgcagtaaaggagaaagatgggaggacttaagtgaggagaagaaaggaggctactacagaggaaataaaagcaaataacaagaaagatgtcaaaaaatctataatataataattatttcataagttttcttaaaatacatatattactgcaggcaggtaagattatggggtgtgttattagttctctctaatattttaattcttatttatttacttacaacccagtggcactttcccctccttcttctgtttcctctcccccacttcccctctgttcccacccctaatccactccactgtttcttttcaggaaagggcaggaatcccatgagtaacaacagaacatgacatatctagttgcagtaagactaagccatgtattgaggcttggcaaggtgacccattacaagtagttgggtcccaaaggtagtaaaagagaaagagagatcctctacccccactgttaggagtcccacataaagaacaatctctacaactgcaacatataatcagagggcctaggttagtttcatgcaggctccctagttgtcagttcaatttctgtgagttcctatgagcccaggttggttgattctatcaaatcttgtgcaagagaatctcttggggttctacaaggatgacccatctaagacacatagcaattgcagatatttagtttgaactggcaatgtccagtcaccaggcaagacttcaagtggaaagagtgggaaaccaacccaaccatatagcctttgacctacagtctgtcctttctatgggatgtgtggatataagggtgtagccaaccaatgactggttgtcctaaaaccaatgccaggagagtaagcacatcactgacactgcctggatcaccaggacccacaggctagatgacctaaacacccaggatagaaccaaatatgactggagggggaaatttcaacgtaatgatgcctagtgatattctgctatactaatagattggtacctagtccaattgtcattagagtggcttcatccagcaactggcagaaacagctgcagacagacatccaaacattaggtggagcttggaatgcttcagaaaaggggagaaaggattttaggagccagagggtcaagaacatcttatttcttaaaaggcattttaaacagtgtacaaagcctttgctgattatgcaaaacaaacaggaaaatgctaacatcattcttgaagttatgatactgagatcaaagcttaatatatctctaggatttcagtgacaaagacatgaataaagttggacacactgcttgtcactgtaggtgatgaaattcatgactgcacaggacagcatatttaagtggttatgcattgatagcttacaaagcaataaaaattccaaaggaactaatttataacttcgaatccatatccatggtgagtcatcttgtgatcttacatattagagatgtagttatgggtaaatgatggattttattatatggtgtgattattcaatctgccatgacatgtagactatgttatataaagttttcttttaatcacgtttcaaataggacctataatatgtaccttgtcaaaagataaaggcagcatgacatgcaatgataaagttgtacaacactggcctttctaaagttctattgtctttctaatttgatatggccatttgaagtgaccattatgcttttcaacattattttctctgtcatgaaaatcaaagaaggttgcagtagtcatttgcaatcagctatcttggtgctcatttgcagtatgagaagtataaccatatttgttctggatgcatttttcagtagtccaattttgcatgtacttttgaaagtgatctgctggttcatctgttttcatatgattggctttactggttttaagtgtttagcataccatattcttttgaatgtatatatattttatcaattaaaatttagttgcttacttatgttatcagaattttgtgacatagtttaatgttctcattcatactttacagtttgtgtttgaatataagtggaaattcataaatataaatttcaggcctgcatgtttacatgatcataccattttgtttttgaagttatgatttgtgtttattattaaaatgcacagagcaaataagaggaaaaattgtcagagataaagataaaaatttgaagaaattaactgggttataattattttctgtgacactacaaaaattagtacactccaaatctgattttgagttttaaggaagccaaagagcaaatgaaaatggagggttacaagattcacacagctgacctggaagaaaagcagatgagctgcccaagggaacagaaaagctttatatttggttgaggccattgtatacttttgcttagtgttgattccaaagagaatgaagtagtggttaatattcactgtcatgtgaatggattcgtagtcacatagaagacaaaactgtgggcatacatgaagtattccaaaagacactcagttgaagagggtatgcctactttgaattagtgtcctaagttgagttaaaacagaggactgaacaactagggaaaagaaaacgtgtgagtgaaggcgtgggtgtaaagatttctctagacccaagataaatgataaatggttgtttttgtggaaacacttgcacagataaatataaagaactgcaggagcatttctctgtcacaagagaaaggacccagcaaaaagaagccatgcctcaagcttctctctttctgcttcagtgcactgaagccacgcccaaagcagtgtgaccatcattacagagtcactggcaagactgctacatgtgagtgtaccctgatccctgatttttagtcttctaagatatgaacaatttcaatgaagtagtggtgtgcttcattagtatcaccaagtcccttcataagagttctcagaactaaaaaacacacaggacacactgtattattcttggttctttagagaagcaaaactgatacaaattatatttatgaagagattattagagtggctacaggctgtggtccagctagtccaacaatggctgtttacaaagaaaatccaagagtacagtagttgttcagtccatgaggcttgttgtaccatcagtatatgccaggattttgaagtaggcactaataccagtgaaggaatcagttttccagggagagagaggtcaagcagacaaagacaaaaagcttccttctttcacctcctttatataggctgccaccagaaggtgtggccctaattaaagttggatcttcccatctcaaaaaatgcagatgaaaggtgatgattcttgccccttcaaatgattgaattaggaaaacaatccctcaaaggtgtatccagccattgggctttagttaattccagtagttaaggtgataaacaatggatagtcacacaagccaaaaacaaacatataacaaaccaaaatgatttgagatgtgcaattagtttaaaaagacattaaaaaagaagagcacaatatgcttaaacatttctggaaaaaaagttcagcataactaaccctggggagatgcaaatgaaattcacagtaagctatcaattcattcctagaaaaatgatttttattaagactttatatggccttaagaggaacattgtgctttccaggtcactcctgaacagcacaaatttgtatcatcaaagagtgccccatagatgtgttttggcagcctctcagtggaccgatggatagtactccttatggtgtttgcttgtacctttctgcactagtgtttcaacattcagcatttcatgacatcagcttattatatatgacatagttcactgatatttaagttcatggaatttttttaaagactaaatgcagttgtgtttcattggtgtctcacagagatgaaaaaaatggcatttgaagttgtgattttaatgtgttttcctaacacacatatccggtcatatagcataatccattttctaagtttttacaaaattaaaaaaatataaaacagcttcaaataagtaaggatcttatgcaaagatttgtttattttcaattgcctgtgtgattgtttgaatagaaatggcccccataggcttatagatgtaaatgtttgataaccagggactggtactattaggaagtgtggccttgttggaggaagtgtgccactgagtgtgggctttgaggtttcaaatgctcaagtcagggtcagtgtctctctcttttatactgcaaatccatgcatagaactctcaacaacgtcccctgtgccatgtctgcctacatgccatcatgcttcatgccatggtgataatggactaaatctctgaactgtaagcatgtggcagttaaatgatttctttttaaaacttgctgtggtcatggtgactcttcacaggaatagaagctcattggctaagatatcctgtttatgttctgatggcaaaaatatcaagggaatctaacatggaagcctcaggtttgtagataaaaatacagataccaaaactcacagaatacataagtttttgtagaaagttttgttatcagccaacagttcctaaatactgacatggagacttattattaattatgaatggttggtcttaccttaggtttgtcccactggctcttataactcgaattaaccaatttcttttaatctacgttttgtcaggtggcttgttacctcatttctccatactgtttgtgttgctgctggttcctctgtgtcttgctgataaccctgacccctccttcttcttcccagcattctctctgtctcagtataagtcctacctaacctcttcctgcctagatattggccactcatcactttattaattaaattaatcaaaacaatacattttcacatggtatacaaatatctcacaacagttttatatttcatttatttatttattgaatagatctgagagagcacaacttattagaagtgttcatctggtttggggtacatcttatccatttttccatgagagaagagaacatcaactttactataaagtcacatccagaaacataatgatgtagaagttggggatttctcaacctaagtgtttaaaacatggaataaaaacatctgaaaattttgctagttaattttgccaagccccatcaaatttaagctgaaaaatataacaaaataggatgctggcccaagtggctatgttgcttggcggctctccacaagaaatggatcagtggtctcctgttgctgttccacatctgttgtgttcattccttcctttaccatattggtagttacaaaaatgtgtcccaaattcacattgttttacacttcaaattttactttcaaagttgacatatcgataaacatgtatcttaatcctatccacccctctctttctctctactcccccaccagaacccacatcttatcatcttcccaaattcatattttctcttttcttttttcattttcctcccttcctaacttccctccctctctttctttctcttccttccttccttcttttctttcttttacctagtgagtccaataagtgataaccatataataattggtgtaggatcatccacaagggcatgggaacctaccagtagtcacacacctaaaaaaaaaaagttactctatctgcccaagaaatcatccaataacaataggttcttacatgtttatcactccatactgaaacatttccctagtatgaggtgaatatgttatgaaagctgtacaattgaaagagcttgtacaactcttgtgtgaataatcacagttgctgtgaattcatgtcatccagcagacatcattttagaatactcctttcaatcccaaagttcttaaattcttccttccctgtcttctgaaacattctctgagtttgtgttggaagatgaaatagatgtcctacttggagctgaaactcacagttgcttattctcagcagttgagtataaatttatctctgcacaaaccactatatactgcaataagcagtttccattaacaagtttgaaaacagcatatacttatggatataaacttacttagaaaatagtttgaaaatatgaccatttagaaaagcaatattaacaagttctcctctaaggcttatgacttgcttatttatgggttttgaacatttttacaataacagatgtaaaatattaccagtagagttgagacattgtcttctctcattacatggtaactccatctaaactcctttcatttagctatagaacttaggaagcttctatggcaataggttcccatatgttttttcaaagggcgttaagtgttagttgttcctccctatatttcttctttcttcattccccccacccctcctttcttgaattattataattttgtctttattaaattaatacaagacctgattttaattgtttcctcccatttagtcatttgggcttacttttcctttacctgttccaaggtcttaaggtacataattaacttattaacttgagatctttgaattcctttggatgtaggcatttagcactaaactttcctcttaggattgcctttcttctgtctcattgattttattgttttgcttttttattttaaaaaatgttttaaattgtttccttttctaaaagtatctcgtgttttgattctatttttaacttttcacaatcaagaatgaaataaaggaggtaggaaagaaggaatccctccctcaaaatttgggggataaagatagaaaaaaaattggtggatgccaaacaaaatgaagccatgagggtaaagataggattcctaaaactactcagctagagatataaaaagaaaagaccactctgaagacaaaattaagtcccggtgccctgatatgatggggtcttccttgaggctgcttctgtctagcttagattatgtctgtcatgagaatcatcactaaatttccatataagttcaatgacagttcttttgggatgatttactagacaaaacatatgccacaaatacaataaaaatatatgcagagagttccaaggaggggattgggggatttagtctgattacttattggaaaaaaaaatgaaatcttgaaatttgaaggcaaatgggcagaattggaataaaccatcctgagttagtaacacagccacaaaaagacaagcatgttatgtactcactcatatatgggtattagacatagagcaaaggactaccagactacaatccacaccaccagagaaactatgaaacaaggaggaccataaaagagaaattcatggtccctcaaagaagaggaaagggacaagaactcctgagcaaattgggagcatggagggtgaagggaggcagataggaaaaagagaaggggagaaggggggagaagagaacagggatcagtaagactgagtcaggggagggatagaggagaacaagaaaatggataccttaatagatggaatcagtataggtttaaagagaaatctggcactagggaaatgttcagagatccataaaaatgaccccaactaagaatctaagaagtagtgaagttgcctttgatgcccttcccctataatgagattgatgactaccttaattgccatcccatagccttcatccagtagctgatggaagcagaagcaggcacccacagataaacactaagccatactcctgcaatccagttgtagagatggaggagagacaagcaaaggagtcaagacctttctggagaaacctcagaaaaaactgaccagatctaatgagagcacagggacccaagttgcaaagctggtgaacaatattggtctgaaccaagccctctgaatgtggatgccagttaggaggcctgggcagcctatgggacctcttactgtggaaccagtatttatccctagaacacaaatggacttgggagcccattccctatggagggatactatttcagcccagatacacagaggcgggcctaggcaatcccacaaattatgtgatagacttcaaggatcccccatgcaaggcttccctgtagttggggagtggaggtgggtgggcaggtggtgtcagtgggggggcatgggaggttgggagggagaaggaactgggggagagtgatatgtaaaatagattgtttcttaataaaaaaaaagaaaatcacctatacttagaactaatttgaaaaaaaagaatattggtgaggaaactttaaaggccaaagtttattttctaaatgacaaagataacaaagaataaaagaattaagttataaatgtcaatatgataaagaggctattgtggcagatactgaatattttctatttgttaacatttcttttatttcacaaaattcaataatgttggaaaaacaccaactacttaattcctacttcaactgatatttgtgatttacgtgataaattttcaataatatctagatattttattggtgcaatagtaggaattaaactaagacccttttatattgtagtccaaaatgtccaataatcacacctttagcctgccacatgcttgttctgttgcaagtatgatactgtaccttagaaactgatttccctgtcagttaattgattttaaggaaattcctaaaggactagtaatacctaggacaggtgccaagatgccaaggcccacctgtcttcttgagtcttatctgtgtatctaaaagtagttggttctactgggaaaacaaatctccatccaatctttataccatatgccatattggtcttaatttaacaattgtatccacaacaaagttacgttagaaaggatttcttctttctacctttttgcatttatgtacgtttccttaacatcatttattttaccagaatttattagtccaatttatagagcagaatacttcgttaggaaaacaataaatatatgaaactgaagtaccacttacacctagtttctcagcccaggtttcactaaacattatgcaatgtatttcatttcaaatgagccaataatactgattactcgataatgctgattttattttattttagttttagcttttttcatttttcattattttaattactcatatttacatatccatccccccattccctcacccttccctcctcccatgtttcccacccaacacccccctcctcccgactcctctccaggaatagtgagaccctctaccaggacctacaaagtctgtcatattgtttgggggagggtctagaccctccttgctatatctgggctgcaatagtatccctccatagggaatgggctcccaaagtccatttgtgctctggggataaagactggctctgctgtccgaggagtcatagaccatcttgggcttctaactggaacccacattcagagggtttggtttgatccaatgctgtttccccagctttataattaggttctccattctgtcagtaggtcaggtccactgtttctgcaagtctctccatccccgtcttggttcctttgctcaaccctcctccctcttcacaactgaattccagtagtatagttcagtgcttagataatgctgattttaaataatacttatttttaaatactttctcattatctttcttaaacatcatcctgaatagttaattagaattcacttattgttaatcataagttattaaaaattaatttcaaaataatgtgcaaaaatccatatgatatattgaattgactaattttgtttttaagaatatttaatatatctatatgcaggaataatgcaaaccatatagaagtagcaatgtattttaagcaaaggatattaaatattccatctcagcatccaaattgagaggtgttccaataataccctgttatagataaagacgaagcttggggagataagccaaagttgctatgatcttcaacaatgatgttatgctgcttccaggatcaaatcacctcttcatcagaaaaccatgaagactgataatgccatgccttctccctttttccaagcacctgaacctctgctaacagatttttaccaccagtctgtctatcagcaaaattacaaagcatttaaggcttcacattcttccaaacactataggcaacttaacacatctaacttttaagaaccctataaaatcacatattgataatgaatacattttgttgtgaccacgtgctaaaaggaagatactgaacccaagacaagttcagcaattcctttaaaccagctgtgagtaccaagtgatggaaccctaatagtttgtacccacagttcatggccacagacctttgagaggccaatcttaatcacacctggaaaatgaagcagcacactataaagttttaaaaaatatatttagatgcttcattaattgataaaatgcaagctttttggttttcttgttatcatgaaagcttttactttcagaatttctcagtctaacatgatcagaaattaatttttatgtatatttttgcaaaaagaaaaggaggcctcttactggaaaaagccaagaatcactgtcttagagcataaacatgaaaaaaaaatcgattaaatcaatttttcatgaagagccttcagaacccatcttctacggcccctgaacagcctgtttattacaccaaggactagagtctcatctgtagatgattgaagtgttgactgatgttacgaggactaattaatacctcaccctgtgaggtagatctccagttaaatcatcattctgtagctcattttgcagaaatgtttggcccacctcaacagatgctgcgccagtgtggatgtgaaagttagagttgtatgctgtgaagggttgctcatgacatatgatcctttgcagaacgcatttagtggtcattgcctatttgatttccttcactgtgtatttctctaggagctatatggagcttgtacttttaaattcatttaggatatcagattccaaagaattgctaaggagataagggacattgattttcttttattcccaatgtttggcatgatagagagaggataatatattttgaatgaatgaataaataagtattcaggcaatcctaaaacgcacctattacacattatcagtctgccctttgtcaacctgctttgttgtggttgttatgccattgggtttatttgacttgaaagaagtctggcattttagattgaccacaactcataagtaactgagcacaataacctggaacttcagttcctccttcctccaccccttgagtgttgggactatatgcatattaccactgtacttggttcactgcctatgcaaagtttctatgtacaggtctatatccttagctatgtacaggtctatatccttagcttcataaaagataattattctgtttttctttgaatttttgctgaaaataattttttctcttttttttattagttcaagttagggaataaggttgtttcacatgtaagtcccttctccctctccctcccctcacccgcatccctcctcccccacccctaacctaccctcatcccatctacccaccactccccaggcagggtagggccctcaatgggggctctgcaaagtccaccaaaaattttagagaatatattctgatcagaatttcccccttatctctcagagcctacccacctcctcactcttccaaatcaattccttctttatctctctgtttagaacacaaactagaggtgggcagtggtggtgtaatcatttagtctaatacttgggaagcagaggaaggcagatctctgtgagctcaagaccaacctggtctacagagctagttactcaggacaactagggctgttacacagagtagccctgccaaaaaaataaaaacaaaacaaaacaaacaaataaaacaaaaacaaagaacaaactaacaaatgcatacaataaacaaacaagaatattaaacaaaacaaaaaatcaaatgaagtaaacaaacaagaaacacatacacacacaaagtaaatttcctgaaaacacaaaactggaaattacaatttataagaccagtaaggcaaacaaaaaagcaatatgctccaaaaattctccaaaatatcactgaattcattttgtgtatgtcattcactgatgggcatggggcctgctcttcaatgtggtttatatacccagtgagaaaaactgtgtttttttttttttaacttagcaagcacagaagctcagtatgtagaccagcctagattgaaacatatttgtaggacatactgaccttgaatttgtgataatcctccagcttctacttcccaaatttgggaatataggtatgcagaactatcagtaaacatcatctaaatgtgtggggatcattactcctcagggatccatctattggccaccagtccacgagggagaagggagcagaggccatcgatcagggttcagctagcttgcagtaggtcccagagtccttttggtgggacctaggaaggttctatttctagcttttggaaaactttctcattgattctcaaaatgattgccccagtttacattcatatcatggagaatatattttcttttttttcccataccttcaccagtatctgctgtcattttatttcttaatgatagtcattcagtctcgggtgatgtggaatttcatagtagttatattttgtatttcataggaattcactggtggataatgatattaaacatatgtttaaatgcctcttcaccatttgtatttgttcttctgacaactattcatatacataggctattttgttgagttgtttattttatgttttatttcttgttttttgtgttagatattacttttgtacagtaatatctaagatacccagtgtgtaagaaatcttcaattgacttttctttgttgtacggagccctttagtttcaggaagttttatttagcagttgttggccttattttatgggggactggagtcctgtttaatgaattcttacctcagctaaaatcattttctactcttgaagagcaggattctattatcagcatgcacatgatgtcacacagccatctgactctccagttccagcgtatccaattccctcttctacgttctgaaggtactatatatgcatagtatatatacaaacatgcaggcaaaataaaaatcagtcttaaaacagtgagagtcctcgcactactattttgttgtatgctccctactttctctttagagtttctagaatctttttcatgagatagttgctcatctttactcattgatgctccatttgcaaaagctaggatatgaaatcatcataggtatactacaactgacaaatgtataataaaaatgtgatacatgtacatagtatacttttctaaaactgtagtgaaagataagaacttaatggtaaattgatagaactggaaaaatcctagcagctttagaattttagactttacaatgagtctttagcccacttggaactaaattttggagatcatccacatttctatctatcttagattgatttcatgtgttgtgttaaaaccctactgctgagtgtggattcacctatctgctgatgggtctggacgctaaccaggatcacttgcaaattgtagcatttatatgtcctcaactattttgatgttcataggccctctctggcatctccttgggcattgcaagcttctgctggatatatgtatgtggtaggttttcacatgcactttatccatgtggcacaagaacacattctctggttgttcttggatctatgcctgctctatatcttgagcgaaattgtttgcttgtaggttcctttcttgatctcacaagctcatgatctcagggggatagtcaataacatcccttttctccttgtaaggaatactaccaattgaaattaaattatccaaatcacatgagtgatggatttcaactagtatatcaactctgcatgaactattatgtagcctgagctgagggatgctgaaggaggtctagctttaaaaagtgcttcagactatattgttcttgcctgcaatttatgatattcataaaatttccattcagttgtatccatttgacagaatgttatcagaaagcactgagatggctgtgtttcataagtttggcctgctttaaaagtcgccattctactcattctgtcattgtagaaacttacatatccttaattcctaacatttgtaatagaatatgtaaacacaaatacagcttatattgttatatggcatttaggaagttgaaattgataatcactagagtcctacaggtaaatctgagcaatttgcatacttctatgaagagaaatagaactgtaaccaagaaacaaataaattgggaaagatacagaatgtgcctaggttaaaagaagcaatttgattgcagatttggttttaagcaaactaatatgtagcataaatataattctagtcaaaattccagaaatgttggggtatgtatggtgcctgtaattagaaaacctatttcaaagaacagcaatcctgaaattaaataaggttatgggattgtttatgatattactactaacattattaaattgcacatccaaaacaaacaaaaatgaatatttttgtcttgattgacaacataataatgtggtcatgtctacttagatttaggaagactgcttcaaatgtaatgaagagaaggagtagtgagagtttccattgcatgctatatttgtgctaaccttgaatgagaaaagatgcaggtataatgctgacgttctggactgtgcttctcatgaggtgaagactgacatgagaattttctgcttacttcaagaatttcctgaactaggctttggttacaaaactatcgttagtttgtggaaatccacctgcagagttgcaatcactgaaagtttctgtatatttgtatataaactaaataaaatgcttatgtgaataattgatgtttgttttgattctctaaatgcaaattgcagtggattgaagattgcccctacagaaaatgttatcttaattcacttatattgaacgcttgtggaaacagcacagctttatacaatagataagggaccatggattgttaataccctcctcctcttctccaagccaaagcccttatggtatgtttactaaggccaaacagtcactttgattcaaattattgtcacatggatcaattttgtaaagagtttacataacccaacatctatgcaggagaaaatgaaggtaaggaatgggattcgtctgaaggtcataggagcaggatgattctaaaacaaccaattgcatttagttcaatgtgtagatggttaagttaagcatagcaggtggaaacatgaaaaaaatctataaacctcaatttacacaagagtgtaaagtcataaacataaagtcagagacatacagtaaaatcatagccatttggactcggaagcttttcaggactcacaactgcctcttccttactgagaaaatttgtctactgaaaggaatctggtgagaattgaggttgtttcttgaggaaagaaaaacaatttacagacagtttaagacccattacagtggtcaaactgaacaaattgaagcctttttatcgtcttttttctattgtcatttgcttaaatttatcctacctcttttcaaaacaaaaataataatgaaaaatttagtttacatgtttagattatgggctacttgtaagacaatttagaacaaactggtcaatagaatttcagtcctgtaagattatttgtgatttgagaaattcaactgggaagtaggatgaatttgaaatttgaagtttcagttgcagaatgagggagagtgaagggttaatggaactttgttagtgataaaggggtacaaaattatcttcactaactgtattatttcatcaaaatgttagctctttgggagtggattaagaaggaaaatatatgtgataagtctctaaaaggtgtaaccaaagggactataagacatcaaagcagaaaaaaagtgaaagtaggaaataggaatgatagtggtaagcaaacagcagtgtgttagggctgcacagcttatttctacaaaatgacacccagaaggatgaaatgcaaaagaatattccatgttctactggtatgtataatttttaccatgttataaaaagcaaagacatttcaccaataaaatatccccgcaattctgattagctttcagagaagttcggaagagttcaagtatttcctcttaaatcaacttcgtagggtgaatgaatgaaatgctcacatcttgtcagtctcacactaactccaacaatatttgtctgatctaagagatttgtctactcctctaattatacgtaattcctttgtataataacacactaattatatctcattatatatacacatatatacccacatcctctctgtggtgaaaactgctcttcccttcactcactactgaagggctgtcatatccagagatcttatttcactgactaattgatactaacagtataatcaactgaagactaatgatgaagtctgcatgccagtgaaaaaatagtgaaaagtttcagtcttctctccttgtaataaatcaccaactatttactcatcaataaccttgtgtctaattcttatgcaatttgaagagtaacaagaaaatataaggcattcctacttcaaagaaaatgattctactgggaagagtttgggtaaaactcttttgttacttaaaccaactacagaagcattgtttttcaaaatggtaagttaaattctaattcagactaggaatttatttagtgatgaagaaaacatcctatagacaaacttgtagatacattttcctagttgagattcccttttcccaaatgaagatttgggaatttaatttaattcaagttgactaagcatcactagtaggatttctgatcatgagacatttctaataataaagaacacatcaacggagtcacaatctacatcactttaccaaccacagacaagcaaaaagttgtcagtagaaataccatttactctgaaggaaaattcaaaccattgctgttattccagaatgtcttctatataaacatcagattcaatagagtctgatgcaaaaatactaccctgtggtgatataaatgaaaatgtcctgcataggctcatatatttgagtgtttggtccctgtttggtgtaactcttttaggaaagattatgaggcatggccttcatggaggatgaatgtccccaggagtcaaatttgaagcttcagcaatctatttcagttccagtgtccctttctgcctttgcctccaacttgtggattatatgtaaagtcccagtttccattgtagcccttgcatggcagccgccatgctcccaatatgatgggcatggactcactctctgaagctataagggagccttgaattaaatattttcttttataagttgctttggccattgtgtcacttcatagcagtaagtaagattaacacatacccattggtcacccatgccctcatgtaactgaacaaacaacagaagtttacttgtattctcaaaggtgttacccttccataaggttagattgtgaatagctcttttagtggttcttctttggtgctaactattttatttgaagctgattgaaattccctttcagaatatttgaattaagattagatttaaattagatatagaagatactgagttgcttctattagtaaatatagatgaagctttaacaaatatgagccagctacatatgaaaaagtttgattgagacaggaagttgcataattataagcaaatttttgtctgtaaggaaaaaatatgtttttggttcccattagcaatggtaagtacaaaattaacttggttcacagtgcaaagtttagcagctgaaaaaaatctccaaagacaaggagcacattcttctacatctatgcaatcttcacttaaaggaacctagagagacacataacaaaaccctctaaaatgtcatcttggaaaagtggtccttgccatcacttaccttctatcttaattgtttccgtggtggtattccacaagacacactctccatgaagctaatttcatcactcttgccaattttttctcttagacttctgtctcagcagactgtgttttccaagatcagtactgattcagcctgttacttctgctttgtgcttctgagtacccagagctatgattttagcacatggtgcattagtgctctaaatagcattgagaagaaaacaaggctccaaagggtgatggcattaatgaaaacaatgagcctcttagtaggaaccctaatacactgaaattccaaatggtagaatgataagtaacttcgtcaatggtcctaattgttgcaaggattgattaactctcataagttataagtataggtatcatttctcttcaaactactttacaaagcaaaatatggaaatgttttctactgatttaaatggcaaaagaaggcgaaagactggaatgactgccatactcagccttaaaacagaagatcttctgtttgggcaacactgccgtgggtatagccaagatactgctctggcacagtacagaatatatcagcatccacagtgccagttacatccaacccccttcgtcttcctggcagactatggtctgtgtttgggaaaggggcaaagccaggcaaaggcagaatgtagcagtcatttctcttcatttctacaatgtcctcttttctctccaaataagaaaacatttgtatttaattatcacttttcatttgtaaataatggggattccaatattgtaataagcattgtaatattgatgaagccaatgttattgcgcttatctattgaaaacactatgatggctcctagaaaatattgaaaatgtgactattatatttgtatgttttcaaaggagacggaatttgtaagttaaagagacatctgtattctcatgcttattgcagcactattaacaccgaggattgaattctattaccaaactattttttaaataagttaagattttatttatgtatatagtcttctgcctgcatgcaagcagaggccaccagatctcatttaaggtggttgtgaggcaccatgtcgttgtcgggaattgaactcagaacctctggaagaacagtcagccttcttaactgctgaaccatctctccagccccatgttcgcaaatttgataaagaaattattattgacaggcacaagtgaaaacaaaaaaagcttctcgactacagcaactgcagtgggatcattgaatcttatgttaagtgaaataagccaggctgaataaacacatactgaataaactcatatgcagaatcttaaaagttttatctcagaaatccagagtaaatggtaacatagaatagggtgagttactttagaccagggtaagacagtatttgatttcatgagaatttgattattggattataatttatgctagaacttctacttatgcgttgtttttcaatagcttatatcattaattaattgtagaaggttggggaaatgactcagtggttaagataagagcacttctgctcttccagaagatatagattcggttcctagtacccaagttgagtggctcacagctgctcgtaactttaactccaagaagttagatatcctcttctggcctccacaggcacctacacatatttgtctgtatcaacatgcaatatacatactaaacaataaaattaaaaaaaacttttcagaaaagaataacttgtgtggatctctgagttaagtcagcacaattgggtatttccatgtttttagaaatttttattttatttattttatcagtaaggatgttttatctgcttgcatatttgtgtaccacatgggtgcctcctggtgacctttgattcccttggacaggagctacagatggtttcgagcctacatgtgggtgcttgggtttgaactcaggtactctggaagagcagccaatgctgttaactattgagctatctcccaggatactctttttaaattttcttttaaggccaaaaaagaaatccctaatattctgcccaccttcaagttcaaggactcattgaatctttagatatttaagcagacacaagatggatgtttcaatacaatctccattttgaccaaagttcagtatatgttccacaattcaccatgacaattaaaaacatacatatttttatttctttttccctttccacatatccctcactgtggtctttctcctttacttttttaaaattcattttacataccaatcacagttcttcctccccctcctactcccttgcccaaccttcgctcaacccacccccatccaatcctcagaaagaataaggccacccatggggagtcaacaaatcctgaatcattcagttgaggcaggacccagtccctttgcccctaagccagaataatagctgagcaaggcatcatcccatattgaatgggcttcaaaattccagctcatgcagggaaagggggatcagttaactcctttactttttaattgttaatgtgtgtgtgtgtgtgtgtgtgtgtgtgtgtgtgtgtgtgtgtgtgtctgtgtgtgtgtgtctctgtgtgtgtgtgttccttaatgtataaatacagtctgtatagtattacttgtatgtatatgatttcaagattgaccacttagtaatagataggaatttatgcatccccccaaccagaaatatgattaccctgctgctctcagcattctaacttgtagttctttgtctagcactgaggaccatgaggtttcccctttacatgttgacttgtctattggtattatctttaaacaggtccacctggttgatgagagttcttgggtgtagcttctctgacatttctaggtgacgcagcctcacagcaaatttcctgctgggctgcatcttacaattttgctgccttttctttctctatgatctccaagccttagtagttgcattgtagatgtctcagttgggtatgggcactgcatggtcacttgtctgcattttgattgattgtagttttctgtaatgtcctccatctgttgcaaggcaatgtttctttaatatggggtgagaactatgcttacatgtgatatataatgaataattagatgtagttaggaattatgatgctttagtaaaggagcagttttaagttttacttcaagagctttgacttcactagtgtctgacaattggctaggtttccagtactaggcttgatggccctctttatgaatagttcttatctccaaatagagaactgttggtactgccatggtatgtgtagcactatgatgcccatagggatttctctcatgcttgtcatttatctcatagacattataacttggtttgtctattggttgcttccctgtctcagaagcttgcatagcacacaccactaccatgaaagctagtcctcagagaacagactttcaggtcagatctagctctgatcttctagatcctgtgcccaaagtacatggacccttgagcaatgcagtctaactttcatcctctggaaggtaatcaatgacaacagtaatgacctatattatttcgaaagtttcttggacaccttttaccaacagctccaaagggggtttctcatggctggtgttggaatttttgttggtctgaggtcttgggttaagcatggtcaacacagaagtaaaaattctattttaagtgaaaatatacaggtgaatgcgcacacatatctatctatctatctatctatctatctatctatctatctatctacttagattacatcttgcatggaattttaggcaggtagaaaattacttgatacattataagtttttcagatatcctttctttctttctttctttctttctttctttctttctttctttctttctttctttttggtttttcgagacagggtttctctgtgtagctttggagcctatcctggcacttgctctggagaccaggctggccttgaactcacagagattcgcctgcctctgcctcctgagtgctggaattaaaggcatgagccaccaatgcccagccagatatccttatttttatttcaccttcctccctcctttttctgtattcttctccctcccccaattaaaacacctcctacttttcccatttccccattcaaatccctggtaacctgcttttttcttctctgttttgtcttttgtctttcatagtcaacttttgcttttttgatttttacaggtactccaagttacccatatctggaatttggagttagcagcctcagataggagataacattcaaccattgttttactaggtttgcattatatcactcatcacaatcttttatagtttcatccatttgtctgaaatttttatttttaattctttaaatctgtagagtattccacatttttatgtaccatgttttcattatccattcattggctgaaaaacagtaagttgtttccatttcatagccattgtaaatagagtgtcaaggaatatagctgagcaagaatctctggaggaatacgtgaagtcctttagataaattttgaggaataatatatctgagttatagtttagatttattcttagctctcttagggttctccacactgatttctggagtatctgtttgatcaactggagattcttaattggaatctaccattctgataaatgtgtgtatatatttttaaaattgaaattaaaatgtaattacataaatttctcctattcttttcctctctccaactcctcccatgtaccctgcagatatatttttaagctgtaagtatttttaagctttgtgagttagaagtccaaaatatctcccctgtgtgacaggaagttgatgctggatgttggaaaggacttcatctaatgctggttcctggagtactgataggtggcctttccatatggccagtgttgcttctggaaagcggctgtgttctgacaaggagttctcttcccaagaatattctgagaaagagatagctgcccatttctgcctacacttgagaactagaacaacatcacttgtgttcaatttgatagcacagaagggcccaggacaagaggcaggcggaactctgtgagtttgataccagcctggtctataagagctagttccaggacagcattcaaagccacagaaaaaccctgtcttgaatcccccgccccagcaaaacaaaacaaaagtgcccaggacctttacatactcaaaatgagttagaagggcttatctagctcaccaacctaatgggaagatcagcaaggaaggtgcagaatctttaatatgctttaattaatccaataaacacagaggctcacattaattaaatgacccacactgacaacattgtaagatattgaacagaattctccacagcttaaaatttgcagagctgtagagacatagaataatgtgtccaccatcataacattatgatgccattcatatgtctttatgcattatttgtggacttctgagaatttacagagacttcaacatagcaccttctttcacaggctcagaataaacaaagtcaatggaggtatgtgtagtggaggcagctctatcaacgataaaatttacgtgttgtgaatgctatcctgtttcaagtaattgaaagcaggaataacttggtattcagatccacttttatagtaacaactatatggttcttctataatatatcctcaactgacttttgagcactattcccctcattaccactctgaaaatgcatacacactaagaaattagttccaactgtacctactaggaaaccaagatgacatataatctctttcttaaccagtacttatccttagtgcatgaactggctttttggagcccattccctatggagggatactctctcaccccagatacaggggggtgcctcagttccgctcctaatgatgtaacagactttgatgatacccatgggaggcctcatcctctctgaggagtggagtggatgggggtggggtggggagatatcggggagtgggaggagaacaggagggagaaggaactgggattagtatgtaaaatatgactgttttaaatttaaataataaattgacaaaaacctttcattttaattgactcccatttgtacagaagaggttcagagtgtgtgtgagtgtgtgtgtgtgtgtgtgtgtgtgtgtgtgtgtgtgtgtgtgtgtgtgtgtgtttatatgtgtaaatttttatgcatatgggtagaaacatgtgaggggtcacagcacaatcccaaatattgaccatttagtcctgccttgtttgggaagatagggtatcttgtgtttcccactgcatgctctggactagctggcctgtgacctttctgggcttctccatctctaccttaccccctgcagtaaaacactgagattacaaatacatgctaccacaccaagatatacagatttatatgggtttgagattccaattcagatccttctgctttcaaaggcaaatattttatccacaaaattgtccccacagccccttcaaatgcttcttaggatcaacccaaactcttaaatactaacatgcttagggtcagttatgcagcatacatgtgtctgtcattaccaaaccataccataaggtggcacctaacagattaaattatcttgattgcttataatatggtaaccaaggaggacataaacatgcatacgcatgcatgcacgcgcgcgcacacacacacacacacacaatattgaggaattaagatataggaaatataatacattacaaaatttagacgaattaatgggaaaatccctaaatctaatgctgaataaacatgtttgctggttatggatgtgtacattggaacatatattctgactataaactttacaaaatatatttgtcagaactaacactgcctcactgtaagttgatgatatcttctttctttgcaaattaaaattttttgaatctgatgaaagctgatttataatttctgaaatgtcagagggaaatcaaacaaataaaaaaacaaagctaatttaaaaatagtgagaagaaagtataaataagttaactatttctcctagtgtttaacaaagtgaagcaaagtataaatcaacaattttatatagtcttctttatagtcttttgatagtcataccaacttaatattattttcatggtgagcctttgctatattctgtcttatctttccttatctttctctttgacacagtgagataaaggctatctgtctaatgataatactgtgatactgtgtctagtatcctaaaacacacacacacacacacacacacacacacacacacacacacagagagagagagagagagagagagagagagagagagagagataacagcatacataccattttaatttaggctagaaaatgtagtattcatccttctgagttgtctctgtctactttaacataatagcatacagatgaatccatttttctgcaaatattatggtcatgttttcttttttaaattctctaattactacacatatttacatatcccttcccacattctctcaccctcccttccacccatgttccccaccaagcccccaaaccatcccccaactcctccccagggctagtgaggcccttcacaggggaccttcaaagtccttcatatcatttggggagggcctaggcttttcttgctgtatctgggcagcaacagtatccctccataggggatgagctcctgaagtccatttgtgctctataaataaacactggctccattgtaagaggtcccatagactgtcttggcctcttaggtgtcacccacattcaaagggcttggtttggtccaatgctgtttctccagctttatgactagtatctccatgctctcagtaggttgggtcaactgtttctgcaggttactccattgctcatccctcctccctctccacaactggattccaggagtatggttcagtgcttagctgtgggtgcctgtttctccttccaacagcttctggctgaaggctctaggaatggtaaacaaggtagacatcaatctcattataggggaggggcatcaatggcatcttctccaccactgcctggattcttagtcggggtcatccctgtggatcccctaacatttcccctgagccagaactctctccaaacctgttctgtcttcctcgatcaaggcatctcctttaatgccctcctctattcctcccctgtctcagtcctcttgttctcctccaccctccacttcttcccttcccacctccttcctctcccccctccatgtgctcccactttgctcaggggttcttgtcaccctccccttcttcgagggactatgcaaacttttcttggggtcctccttgtctgcaaaatttctattctatacatgtttcaattcttttatcactgttgataagcatctgagcctgtcaaatttcctggctattgtgaagactgcagctatgtggatgtgcaatttttctgtaacatgttgatttaatgtcatatacatgcatatattataacctggtatggctcggttgtgtgatactttacttccagtttttaggtctgatatatatataatggctacacaaatttatgttcaaaaagcagcagtgaataagagttctcgccccacattcttgccagattttgaagagatacttgttaattcatgttctttgctgctctattcataatatcttaaaattggaaacagcctagatgcccatcaactgatgaatggataataaattgtggtaaatttacacaatggaatattattaagctcttaataaaatgaatttatcaagtttgcatgtaaatgaagggagctagaaactgtcaactcaagtaagatgatccacactctgaaagacaaatattgaatgttttcttttatatgcaggtgttagtttttcagtttcttatatgagtactatattctaaataaatactacattcttaaggaactaaaggggaggagaagatcttccagttaaagagaaatagaacataccattatataaagagatatctaaaatatagggattaaatgaggaggatggggtggcagaataaaggagagaaaaaaataggatgggatacctaacactaaaggccttttaataagctgtatgtaagtgtacccttggagaagcttccatatatatatatatatatatatatatatatattatatatatatatatatatataatttaagtagaatccccatataatagaggaatcaatacaccaaatatatattctatgccaccaataaaacgtcaagtgccagaaataagttacatcttgttgaataatttgccaaagagctcccatagatatccctacacaccacagacttgttgataaggctgttgattactctccacagcctgatagttaagccatattgctgaagacactacttacttatatactagatcatgacaaaatctagttggtgctcaactagaaacttcatcccaactgctaaattttatagtgctgcaaggtactcttcccacttacccaggagaaaagtatttacctgcaagactgaggtacaaaccctatgacctacaacattgtaagatatatggttgaaacagtggaagaaggtggggatgatctggagggactggaggagggcaaaaaatgttcaaaatatattaacacttaaaaacttttaaaattaaaaacattgatgtcattttttaaatcttgatagctatcaatcccagactctgaagaaacacgcatttctctgatggctaaaaatgctgctcaattgccaagcatttttgttcatttatgcttcatcttttgagaagaatttcttcaattcattacctcatttgactgaaaggttttgtttgtttcacattctttggtattctgtgtactaaacactatatgatgccttgttattaatagttcctttaactctgtaggttatttctatatccttgtgattctttgttatataaaagtttttaatttcatgtaatcacatttgccaatcccggaattattttctgtcatatttctgtttgttccagattttttttttttacttttcctatgtcttagccattgttctattgctgtgcggagacataatgactatgacaacttttgtaaaagaaagcacttagttggggcttgattacattttcagaggtttagtccatcatggagagaagcatggcagcaggcagacatgatgctgtagatgtatatgagagttctataccctgattcccaggcaagataaaaagaagggcttagaataggcttttgaagccacaaaattcatccagtgactcagttcctccaacaaggtcctaatctttttaaatagtgccagtttctcatgaccagttaaagaacattatcaagaatgaaactaaggaacaacaagcctcattcacaatagcttcacgcaaaataaaaatacatcagactaaaacaacttaaaagataaaatacttcttcaatgaaatctttacaacactgaagaagttgaagaagacactagaagatggaaatatgtatattattctttgatatgtagaattaacattgtaaaatggttataatgttgtaaacttaactgtataacacactaattaaaagagggtgtttatgttccttaaatttcttggttgatagtctctctatatcttttactatatggtctttgaatgtggaactcaaagctttagcacctaatacactataggctttccagtaaaatctattcaatagaacctatggtgtttgtatcctcccttcgtgctatttagtataaattcaacaaaatataagtgaacaaatgaatacaccagtgttacagttgcacattcaagttcaaataggattaattagtaaagaaaagtatccagaagagatcagggcatcgtaattaggcataggatggcatcatacatggcacagatggcaagagaagatcaaagtcctaatttgagctttcaagccttacggaagagagttttgttcttttgttataatctggaattcagcatattggacagttccctctcatgtttagacatacaaaataaggaaaatctgctgcacacatttatcacgtcaaatgctttagtcttctagaaacgctttcacaaacagacttaagagtaatgaatgcttaaccagatctgtgtttcaagaagttcacacacaaaacacacatacaataactgctatatcataactgtgattgagatttgtaaccatgtcaaaaactggcactagaactgaattttttctttatctgagaaaaaaaattgatttgggcagtccgttatagtcttgctggccaaattttctaagtgtgaagtccaaaatgcttttttaaatagataatcatcaaataaatttataattactttccttcaatattccataatacatttggtggtacaagaaacctgtcacagacaaaggattctttacataatgctttttctatagaattgtaggaaatctagtgtttgtttctgaagtgacatactcccaactctttacacaatacttgacttcaagttttattacagatccagccatgcaaaagtgtatgacaccgctacaaaaaaacagatttgtaaattcatgatgtcttggtttgctttctattgtagtgataaatattactgtcaaatgaatattggggaggaaagagtttttttgacttccatgtactgatctacagcccatcatggagagaagctaaagcaggaatttaagtgcagtaggattcgggagggtaggacatgaatcacaccacgaggaatgtgtcttactagcctgcttgctcagcttgcatttttatacaaccctgtgacaccaatccagagattgaactacccacaatagcctgggactttcaacatcaatcattaatatgacgatgatgatgatgatgatgccgcagagactttcccataggtcaatcttatagagacattttctcaagtgatgttcaatctttccaaatgactccagcttatgtcaagttggcaaaatatcaaccagaacagatataatagaataaggggtcaatgacgaacactgtaaaagccaccttacttttgacaaagatgtcaaaaatgtaaattgtagaaactactgtctcttcaacaaatggttctaggattactggattttcacatctaggaaaatgaaaatcgatacccacctctcatcccgtacgaaagtcaactcatgttggtcacttcagcaaactaattacatacctccatcaaatcctggtagtctgagtgaccagacacataaactcatttgagctacaaaacagatatactctatattcagagacagagggtttatataaggaagattgttaagtatgcagtaaccaagtggctactaaagagaacacctatttttaaataatgtttttgtgttttaagaagacagtttatatcaataaaattttatacattaaaaatacatcttaaaaaacagacaggagttaataaagaaatagataacaagacacggagactttaatacccctcttccagcaatgattaaaagagttgaaggacagtgagggaagactgaaaacccatttaaagggagcattatcattattcattccaacataatccatgttggttctgcttattaattgttctaaatattttaacattatttctcttagctgatagatatataaagcaaaaataatggtaaatggggcttatgaaatagtttagtaggtaaaggcacatgccagcaaccttgagaaacagagtttgattcacagaaccagtatgagataggaggaaaaatctggcttcaagtttttgtctgactttatacttctgtatatgtaccatgtcttacacacacacacacacacacacacacacacacacacacacacacacacacacacgataaataaatactaaataaataaataattacaatctgttggctccatacttctgcaatgatccaccaagcctcagtggaggagttgtgttgtagctctatctactgggactgggttccccaattctgcaattttagtggttgtggttttctgaaacagtctccatcaattacaggcagttgaggtacatatgaaggtttgaatgaataggggaaatggaaatagaaaatgaagcaattgtaatatctcacagagtaaaaataataaaattttgattgtaaatatttatggaatatcatgtgaaaacttgattacatatccattttataatttgaccaaatatattaatccactcatttataattgctatgtgatggaatattaaaactatttctttgttttagatatacagcatattggcatgtttataattcgccagtggcacatactagaaattttactcccaagcaactatatagtagcatcatccaccagtcttcccttcttcttccttctcctgcttttttttacctagcccctggtcatcatcagtttactctcaacttctaggagagtataccagtatttgaaaccttatcctgattagcttaatcacctattcaagaataattaatggtttctttgctcctagcaagataaaatccagattgcttagcctgtcattttaatatactcaactcttggccccaggcttgtttattatcaacacccaattttcaggaataattcaatttttattctttttatgaggcctatactgtataatttatgtctttctcctatatttaaaatcatttctctgctatttcatagaattctcttcagttgctttctcaaaggcagtatccaccatgcatgctttcttatttcccaaagaaaaataatttgaaatacctgagggaaacctgtgaaggtttctgaacagttgaaaatatatattctcttaattcgtctgatatatttgtgtttatattctgactttcgtttcactgaaataaagagaaaagaactcatacctgaatcactatcataaaatggaagtactcatacttactcagaatactgcaagtccactatctgtgctagtttgtttttgttgtttgttaagcactgactaaacccaactggaagaagaaaaaggtttacctggatttcagtttgcaatccatcttccagagaagtcaaagtaggaacacaagcaggaacctaggtgcaggaatcaaagcagcaacttcttttcatagttttttcagtttgatttcttatacactctaagcatcttctcaggtgttctacttctcacatttggctgtacctttcaatattagtcattaatcaagaaaatgcccatagtcattcccacaagccagtgcaatggaggcaattctttagttgaggttccttcttcccaggtgactctgctttgtatcaagtttacaaaaattagcaacaataacatctaaagaggagaaattgattaattaattaattcttaagtccctgttcttatgataaaggcaagagttaatgtttcacaatctaactatatagtcttttattatgtttgaaaacacttctgtactttgaagctcttcatttgtctgaatctgagatttcttccctcccatattagtcacacttctctttcttttcagattacatttccatgttttcaatctctaattttagaatgtcctaagcttggactctggtctctttgccagcattcaatatccttttaaaaataattgatttgtttatggtttcattgttcatatatccattttccccctctacttttctccctccctccctctgccctgtggggtgtgtgtgtgtgtgtgtgtgtatgtgtgtgtggtgtgtgcctaggctgcagataaaaatatccagccacctgttcactacctctctttggatgttaatttagagttaaatatccaaaggagatttctgtatctttctcctaggaaaatacagtcatgcatctcttttatttcattaattaccacaacaaccaccagcactccaaaacaaaattatgagccatgtgctcataatagccatggaaaaatccaaatattttcaataccggtgttctcagaatactcatctaaaccatctaatattctgccctaagacttgtcaaattttcatagctagtttttatttctttcaattctggccgaataatgggtaatgtgagtcccgactggctttacttgtcaatttgatatagaaccctaaaagaaagcctcagtccaggaattttataaatagagattgttctgtgggcatatatgtgagacattatcttgattgttcattgatgtagaaatggcttgccaacctttggtgacactatccctgtgtagttggtactgaactctatatgtgttagcacagcctagcattcagctagcaagcagcatactccataggttctactgtgtgtgctactttggctgtagaatcagttccttggctgaagaaagtaacaatgtataaaacagcaagcacacctgattttcaagctgtgccttgtgttctttccttgatttcccttgatgatgaactgtaaactagagttgtaaaccagataaaccttttcctttcctaagttgcctttggttagaatattttatcacagaaacagaaatgtaactagaacactgtgtgtcctaaacctccaagtctgacctcaataggaaaccccactagtctctatgtactccacattttccataccctgtgagcagctttgggaggtatcaccaaaacttaggatccaggaggaaatggcatgaaggagagagatgaccaggatcaccccactcttctgtttgcttgttcatagaaacactaagaaaagttccccattattgtcctaagttcactgcagaatcttttcctgatttgctagaccattatggaaaatatcttcattaaactctcttcaaaataaccaatttgagtgtataattacatccaatcaataccctgtggtccattatgtttatatcaacatattttaaacatgtaaatgaagtcatgaaacatttgatttcaaaggcctgaatcagttgattttctgatagtttcaggtggagatccaaaactctaggcaagcttttgagtttctggaggggtgacactaagacctcactttatatttcattcctctattcatcatcaattctattctttatggtcttactttgtatttgtttttcaaacaaaaacatacctagagatcaagtctccatctcagagccccttcagattttgatcttccttgaattccctcccccaaacttccctcctcttttcatgtagatattgtttcacatggcctcacaaactttcaaaattgtccgtaacttgcattcagtgtctaactgtgtatctaacttaatctttattctagactttacctccacccaaaatgttatattacttccccgattgctgcccacattgttgaatacagtgtaggccttacagtggcaaagacttctctaagtcattgctattttcaaactagggaaaccatgccatcacacacatgtgatcacaaattacctttaataggtaagggagtgaatgagaagataggtgtaagtattaattttcacttaagaaccaagagccacagagaagatggctagctacaaatattatactttattaaaggatgaactttgtctctccacattcttaacttcacatcattaaacctgaaaaagtgttatacatttaaagaccctttaatgtgagtaatgatggaagctttctaaggagtcacagtgcaacagcacagtgactattagacacattaagggagacgatcaggaattttagtatttaggtaagtatgtccacatattttgaacaataccaattgatttctaacaattacttgagtttaacatgtgttattactacatgaaaaacttagtttctgtaaattgggattttttttgctatgattttctaaatattctgtccattccatttgattttacctctgctccttatttaacaccatatattcttaggtttatgcttcttggatttcctgacttctttgaatatcttaaagccccttattgttttcaccttatatatggaggtttttattattatatcaatgtttcattcctcggagtttatttattcttcttcatgttcttgctattgagggtatctgctgtgatttcttgtttaatttaacatctctttcaagagtttctgtttgattgttttgcaatgttacgatcttcttactaaagttttcctccatatgttggactttcacttccattttactacctattacattctctttattagaacatcttgaaaagttcttggtttcttaatttgtccatctgtttgaatcttctataagatcattaattctttaagtgagtaaaactctgaattatttctcagacatttcagctatctctggctttttatgatgattctgtgcataaaatagaatttgttaggaaagtgcaaaaatcaatgtgaaactccacaaattcagaatgtccatcctaactgtattgtagttcactaagatgtatagactttgggcttggataatcataacgtgtgacattattatcttcaaaatctttacagtaaagttttaattatttaaaataataaacaaacaaataaatgcaaaagatgggaaacaggcatgttcttgcatgtctaggatgaaaagatggggagaatttgggaagggtttcaacaacacacattatatatagtatgaaattgtcaaataattgatttaaataaagcactatttttacaaagtcagcatgctgtagtctcattataactcaattattttaaataaaatctttctaaaagaagctgaagaattcttcactcatttgagaaggaaatgaattatctggggaattttgcaaagagatatgatggaaatgagcagaaaaccagagcccaaagcagacttcttaaactcaggtaaaataatttttgcttgaatttctttctttgaaagctttcaagtgttactcataatcatatgggaattcatacaaaatatttgaaagcacgcttataataatgctaatttctctaaataaaattaggataatgtaagagacaagatcaatgaatatggttctgcttttgagaataaatgctgaatagaaggacatatttgatatcccacacataattgacagacacgaaatctaagtgatttgaattcaaatcaataatagcattgtttgattctgtcctcagttgttaatttatgtttccctaatggtattattagccaattcatattggaatagaaaaggtattttcttaaggaaatcaatttttaaaaagtcccaaaattttaagtaatattgtattattctcacaagaattctcaatgcatacaacttctttaaagaattttttctttttaatgctcttttttattttttattatttttacaaaattataattttacatgtcaatcccttctttcccccaacccctcaccagtcccctcccccttccgctccccatagagggtagggccctccatgggggggcgccccgaattccacaacatcatcctgggccgggcctaggccctccccagtgtgtgtccaggccaagagagcatcccttcacatgggatgggctctcaaagttcctattccagggaaaaatactgatccactatcagaggccccatagggtgccaaggtctcctcattgacatccactttcaggggtctgggagccatgtgctcccccttgttcaggtcagctgtttttttaagggaaattttttcaagttgcatcaacttgcctccaaatttcatgattttatttatttattcatttgacccatgagtaacactccattgtgtaaatgtatcacattttatttattgttgtgggatatttgtatgctatgtgatggtgtaatgctatgattgattaataaaatgctgaatgccaatagataggcaggaggtataggcaggacttctgggcagagaggggagaatggcacatggagacacggaggaagcacaatgggtggtacttgatagaatgtagattggcagaaatgggtttagttaagttataagagctagttaaaaacaagccaaagctaaggtcaagcttccataattaataagtctgcatgtcactattagtgagctctcagcccaaataaaaattaggcaaacatggtatgcagtcacttataaggggaggttagctataaagtaaaggataacaatgctaaaattcacagattcagagaggtctgtgacaaggacagtgtgagggtggggtgattgcaaggatctccatgggaagggaaattagaataattttgtaggtggactgaggatgggtggggatgggaacaggaggaatcaagtatggaagaatggagagagaaaatactgggaaagactactggaattgtgggcatttccgggagtgatatagaaacctaatacaatgaaaatgcccaggaatccattaatttgactcctatgaatgggggatgcagagattgaaccagctatattctgtaaccaggaatgcttccagtgaagagattgggacactagccaagccgtaaaaccttagacctataatctgtcactatgacatgggtctgacttaggtcttctgcatatatgttataattgtttagtttgatgttcttgtgggacttcttacagaagcaggagctgactctgaatcttttgcctacttttgagacatttcctcatcctaagacctaagccttaatatgagggcatgtgcctaacattattataatttgacatgtcatgtttggctgatatccttgggaggtatgcccttttctgaagggaaaagaggaggactggattgtagagaaaggggaggtgatggaggagagactgggaggagaggaggaaagtaaaactgctgttgggatgtaaaatataatagaagaataaataaaaaccaagaaagaatgttttaaagatgatttactacttcttaatttgtgttcatgagtgtttaccaacatgtatgttatgtatatataccctatgcatgcatcatccaacaagttcaaaaactggcatccaaatcctcagaaatgtaattgcagacagttgtgggccactgtgtgggtgccagaaaccaaacctgagattagtgcagaaacttcaaatactcttaaccactgaatcatatacccagtcctaatacctcatctcaataaaatgagggaaaaacttgaaatataagaaagaaaaacatttaaatgtttatcacccatttctgttttatcttttgagaatgtctgcttagttacatgtactgtttttgaagtggaatgcttgttttcttttagttatttctttattccagttaatgttctttaagatttacagttggaatttttttgtttttttttcctcttttaatttatagaaagaagtttcttttacatgtcaatcccagttccctccccctgccctcctcccttgccctgcaacaacctctatcccatgtcatttctgctccccaggaagggtgaggccttccatgggggaccttaaaagcctgtcatatcatttggagcagggcctagaccctaccctgtgtatctaggctgagagagtattctgctatgtggagtgggctctcaaagtccattcatatactactgataaatactgatccactaccagaggacccataaattaatcagacctccaaactgacatcctcatttagggagtctggaacagtcctatgttggtttcccagctatcagtctggggtccatgagctcccccttgttcaggtcagttgtttctgtgggtttcaccagcctggtcttgacacatttgcccatcactcatccctttctgcagctggattccagagttgagctcactgtttagctgtgggtgtctgcttctgctcccatcagctactgaataaagggtctaggatgacatataaggtagtcatcaatctcattatcagagaaggggttttaaggtagcctcttgactattgcttagattgttagttggggtcaactttgaagatctctggacatttacctagtgccagatttctcattaaacttataattgctctctctattatggtatctcttttcttgatctcctctattcttcccttggctcaatcttcctgctgtctcatgtcctcctctcccctcctcttctcctcttctctttcttctaaatccctctcccctccccccatgctcccaattagctcatgagatcttgaccttttctccttttccaggagactattacgtctctcttagggtcctccttgtgttctagctgcattaaaaacatggaaaaggtgccacatagatggctcagtgtttaaaagtacttggcgataagcatgatgactcacacactgtcaataggaaaatgtctccaaaagatgttctatagcttcaacacatacagcgcacatatgaacacacagataaatactaaataatttaacaaaagtggctgttaaagattgaaaaatatatggagtagacagatacttaagatggtccaatggtttggaagacaggagaagtacattaggcaagaacatgatttctgacttccagcacactcaaagggcaattatgtggggagaatttcattagaccccagctacctgtgtcatctgaacaagaatgaggttgccagaagcttcaaaatacttctccgactatcttctgccaacacccatatacttgttcacagcaaaaattcaaagccagtgaaacatgccttggcctcttttcaatttacctaatatatgcaagtacccatcattggtagagtcaagaactcccttcacttgcaaaaagattctgtgaaatctatactgtagatgtcttatttaaaatgtagctgaaaatataagtggcaacaagaactggctgaatgatatcagtgttacacagtgaaggattttccacagtggagtgcactggacctgctgagatttctcagaggtcgataagatgctcctgagaacatcagcagccacagacttaagaaggtaattacaggcttagaaacaaaatttttggtacttgctcttctagtatgtaagtccattgctcttccaacttgcaagctactgatgctctgggtttctcaggaacattttatcaacctaggatatcattcagtcagaatgttctttggagtacaagtagaataatgaaaaaggagtagtaacaaaaacctgttcactgacatggaaaagtcaatgaactttccatcagtttgaataggagtctggcagttagttgtgtctggcacattgtgatgaactctgtgttggtagaaagctcaaatattgagggctactagaaatacaactgggaagagcagaagagaggtgtttcactatttccaagtgaatatatatatatatatatatatatatatatatatatatatatatatatatatatataatatcagggcatggaggcccagaacgttaccaatatcctttccatacacatggaatatacaagttctatccttttctcccattccttcttttcctcaatacttaaaagaggaaggaaaagcagatgagagaaagggagaggcaaaatgaggaagagagttaaacagaactcatcaccctgctgccttgcgggtctgtagtcattgtatgagacattcctcaaagaacggtgggagagactggacctggacttgaaatactgagcctttactgtttcattgcagtaacatttcccacaatggagatgccctgaaaagaccaagctttcatcaactagtaatttatgtgaaatgaactataagtgaaatagtatatgtaaagataatcattgaaaataaacaagaatagttgcaagaccctcctgtgccttaatatgccttatatttctgtatttaaaaaatatctactctcactctccttagctttctcttatttgcttcattgtcactccttacattccaattccatgtgttttcccacagttattgtcataaaatttatgttttgactgtgtgtagttattgtaatcaccataatcaaaacattaactgttacaacaattaaaataattgctgcttctttgtagttgatgtagctgatcttattccccacagttgtgatttgcttccataaactaaggttgtttttttgtggctattgtgaaaagcattgtttctcaaatttctttttagtatactattgcatatatactttatgaaataataatgaagtccatatttaatatcacagaaataaaaagtaagtaaacaatttgtgttattcacatctatattagtatgatcttcataaatagttcatgaaattattgtttttccattcttgtcattttattaaatttattagcttctttctcctctttcgaaaaatgtggtttaatcatatttctattatctagtcacagttaatccccatatacagataatgaacttataaatttaatgatatattcacatacctcacaacatatattatatacaatactatatacaatatgttatatatgcaatgtacatataacaatatatataacataacatatacaatttacacataagttatatatactatatgcaaacatatgtgagatgtaaatcatatatttaagttcatacatactatatgatatgttaatatattatatgtaacatatatgaactttatattatatacataaaatatatcaatatatgtgtatatacatgtattatatgcaaacttataaacatgagtttgtatagcagatgcattatatgcataatatatactatatatttctaaatttatatacatatatatttgcatgtgcatatgtatgtgtacatatatccacacatatgcattaatctctattaactaacttccaattaagttgcttgaatcaactaggatttccattttctttctacaaccgtaacttattgttattagtcaagtgggcaagcttctaatgaacttctagcttctagtgaagtcattactattacaatggctttatttacaggataagtgtttgctttattaattatatctaaatcttatcccacaaaaactattaaaataatttttgaagtattcgtggtattccatgtattttaaattttcactgaatcttaaagaaaacaaatttggaaaatataagcatagtctgcatgagtaaagtttagttggaagatatgtttaacaaagaatacaaaaccagggatatatatacacagggtttgaagtaactaggtcgatattcatagttctcctttgagttgagttccctaacagttttcaataaagaagttatactttaattctctaactcagctatttcctcttaccattagctgaaaacaagcttgaaatttcagttacctttattgaaacataactttatgttggttttaaaagctctatttccagccttaatttctttcttaagcctcttgatttcatttttgaatgtcacatcatttattcaaatcatggcatcaatggattaagttatattgtcattgagaacttgactagttagattggctactcagaaaacaccaggcatacagctgtgttagtctccccaattctgtgattacaggtgactgctacttacactctgcttttattcacagtctgagaagtatccatcatatgaagatcaaacacacacacacacacacacacacacacacacacacacacacacacacacattgtgtgtgatattttgtttgtcttctgtcaaataaagcttgtttggagtcagagggctgatctagccactagttagacatagaagtctggaggtctgtatagagaggagataggaagtgacaacatggggtagagaaagggagtgacaaggcagggcgtagacaatctcagcccctttcagtctgagaattcagagaggtaagaggtgacccttggctgctactttctctctctgatctttcagcatttgccttgatatctgactctagatttttattgataaaaccaattagaatcacacttcacacatacaggaaggagaaccagaaagggtaaatattaagtcatgaggaaggactgaatgcaggaaaaggacacatgtcatgaaaagaggtataataataattgtttttctagttaaaactccatcatggatttctgttttgttgtagaaggttaagtcaataaaatatagttggtagtaaaaatataaaaatctaatatgaagcttcacagttttggaatgacaagtttaatgtgatggatttcattgaaacagaattagaatttagctgatttttgtgtgttatttatttatccatttttgtgtgtatgtttcacttgcatgctccacgtgacagtctggttcctaaagatgaggcttgatcctattggagtagatgaaagagggttgtggcctgccatgggagtacctgaaattaaactccagtcctctaaagaataggcaatgccgggcgtttgtggctcacgcctttaatcccagcacttgggaggcagaggcaggtggatctctgtgagttcaagaccagactggtctacaagagctacttccaggacagcctccaaagccacacagaaaccctgtcgcaaaaaaaaaaaaaaaaaaaaaaaaggaatagacaatgtttttaatcactgaaccctcaccacagccccaggtatgagatatttttttctttgtttacatgttctttataataaaattttaatagaaaaatacaaaattatgaagatgaataaatggatgaagattgaagcaaccattctgaatgagaaaacaaatgctcagaacaacaaatatcccatgttttctctcatttgttgactttatttttgaatctttaagtatgtgtgtttcatttggaatacccacagacatcagaaaattctagtgtggcctggagtgtggtggctcccaagggagggagaaaaaagagttagagatataaagaaataaaatagaatattagagcaggaagcgtgtatttgagtaaaagatagagagtagagtagaagaagaatttgtgggtggataaaaaacactaaagccctttcaaaaaattcatacgaaaacttacttctgtcaaggattcctaaactaggcatatacacatgtaaaaaagagtaaaaatggaggtgccttgtagaagggcaatagtacccttactagacatcacaagctaacaaatatgaagtctagtgcaaggaatggcttatttattttggtgttgttagccagcccagtgcaacagagcagaaaactttacatattattaccacttctattttttttccataacttgattgtacgaccctactgctggagacagcacatatttgagtaataggtcatggagaaatcaagctagtagtaatctggacatttcatctcaactatctatttttcatagtattataaggcattgtgcatgctactagaggagaaatgtaataatcaataatcaattgtaaccagctgtgaatactgtaaagctccaataaagagtattctggtaattaatagatgcccaatagtggttgtatttaaagctttttcttacaggatgaaacccatacctgctatcattatcagactaagaacctgctactaggcagggaatagattctaggagagagcctactattactttcctaaattgacatagtattaaagtgtctctttatgacttatctgtatagtgatacatgaatacatctctcaattcagagatctgcaacttttgctggtgcgaatgacaaaagctacggaatggtatgctcttgataagatatctatagcccacttttagctctcaaggctcaaggatcactgcagaaatggagtggaaagtgtgtaagaattagaggcggtggatggctacaaggaaacagtttcacctagacacaagaataacttcccatatgaacccacagtggttgtacaacatgcacaagacaggcaccagctcaagacaaaccaaatcctagcatggagttggattaaggaaataaaaacttaggttaataattaaagactttgcattgactttatgtctgtgacacattgtgcacactgtgaccagaaataaaacattgctcttaaaatgcacaaattaatttatttctggaaaaataaagaaaaaataaaaacttcagatcttacatatcttgtgtgattcctaaagacagctgtaggctgttccccacactgttaactagtggaacatttcattgaattctgtggcaagaatagagaatggagaaagatcccattgagattaacatataagaggaaactgggattggtatgtaaaataagattgtttttaatttgaatgaaaatttacctaaaaaaagattaacatataaaacttatacagataccagtttgcagagacagagatgggaagccctacccaaactgagcttcatacaacaaatagagcatgctcaagaaatcctagaatttacaaatatggaagagcattaatgctatttatacatgcacaaagggacatggtttttgttgctcattgaattatgggcttttcccttaggtcactatccaactttgattttaccaagtgctttttcattcttaataaactctctctagttttaaatatacacccacaattgaacttgtttaccactgaacacgccaacctcaatactctaacaaatgccttcattgttgtgggaattcttttatccaatagcttttgggggaatggcgcataggatttcatttaaagtgctgactgtggatggataagtagagcgaagaagcatgctcgctctcttcggaggttgcaccagaagcaagcttgtgcacttgtttgcttctcgctgggacagactggcaggacacagcagcctccaccttgtttggtattctggtagtctgtgtttctctttaagtcccatttccctttgtatcctcataataaagacaatttgtaactctcgataaacctcttgttttagctcgtagtctcagatacatggcaattatgtaagcataccatgtggtgtcaagggatatctggcttgtaaactaggcctgcaatggtatccctgttcttccaggtttgaggtaaatgagttacagtaattcctctatcctcttcaaatctcttgtgcacagtaggcattaaatgtagctatgcatgagcatggttataaagacataaaagctcttaatagagaatcttatgaacagtaaataaatgttcaaaggatgcatatagtcatttttgttcttcaccttaaaatactttattgttagtgactataatgataacctgtgaaacttttacattttaaagaatcataatgttttaggaaaattaaaatgtgtcttttagattacctgaaattataactagagtgaactgttgctgagggtgattaggatttgtgtattttattcttcatttaagatttcttcctgggttatattgattacaaacaggtttttaaaaaaaggggcaagggggattgctgtatccagacagcaacctggaggattttgttaagtggaacctcatgattccagtctgaacactcactccagggctgctttgtgtcaaagtcagaaataattgacatactacttaacaaagactgaaaaatgaccttgattttcactttgtccctgactcagcaggatacttttgctattcttttcttgttgaataaacatgacaaaatactggttaaaaaagaaaacaaaagccagaacacccttacaggtttattctgagcaagtactacaaatgattgtatttttcatttttggtgttgtaatgtcctttaatgtattacaaattggaatatgattttaataatttatttgcctacatgacatatagctcataatatattttatgatgttacatgatggaaattatgtaaatattatatatgtgtatatatagcacatatgatgtgtaatgttacatataatttttaaagtttttattatttttaattactcatttacatatctaccccccattccctcgtcctcccctcctcccatgttccccaagcaacccatgccagcccaccccctgaatgttccccagggattgtaaggccctctaccaagaaccatcaaagtctgtcatattgtttggggcagggtctagactcaatagtatccctccatagggaatgggatcccaaagtccatttgtgctctagggataaagactggctctgctgtcagaggagccatagactgtcttgggcttctgtctagtacccacattcagagggtttggtttggtccaatgctgtttcccagctttatgattagggtctccattctatcaggaggtcaggtccactgtttctgctggtttctccaaccatggcttggttcctttgctcaaccctcctccctctccataactgaattccagtagtataattcagtgcttagctatgggtgtctgtttctgcttccaacagcaactggatgaagactctccttcctctccctgcccctgggatccaatttggccaggggttcttgtccccatccccttcttccatggaatatgcaatattctcttggggtcctccttgtttcctagctcctctggcagtgtggaatgtaggctagtgattctttgctctatgtctaaaaatcaaaaatgagttaatacataccatgtttatatttttgtgattgggttacttcactgaggatggtttcttctagttccatccatttgcctgtgaatttcaagattccattgcttttttcccactgagtagtactccattgtgtaaatataccacattttctgtatccattcttcacttgaggggcatctaggtggtttacaggttctggctatgacaaataatactgctatgaacatagttgaacatatgtccttatagtatgagtgtgtgttcttcgggtatatgcctaagagtggaattgctggatcatgcaggagactgattcccattttcctgagaaaccggtggcccaagctctgctgtcacttgagcacccaaaataacacaaagagtcttatattatttacaacgctgttggacaatgactaggatttcttatcttctagctcagtcttacttatcaaccttaatcataagacttatcttattaaggatgctggcaaaatgagtccgtcttgccggaatcacatggcggcttcggggcagagagcaggaagaagaggaagagaatgatttcctatttgtccctgcttatattctgagtctgcctgatatgttacttcctgcctggatcacaagattttactacatttcccagaatcctcctttactcctagtcccacctatcattctacctcattggccaaacagtgctttattcattaaccaataagagagacatatatacacaaggacttcccccatcatttcctcttttctgtctaaaataaaaagaaggcttttcattaccatttataaccaaccccatttaagtgaaaacaaacatttaaaaacaatatttgggaatttgggtgtctttcattccaaactgcttcttgctggaaaaaaatgaaagtaaaagaaatagaataataaaaagccatgtaaagatggaaaatacacagagagtctggatactattttctatattgttgtctttaaattatttgatttctgaggaaagagctacagctgctatgacatttgattatcaatgctgctaaattaatccaacttatatattttaaaaatgctttgacttctaagtttaaatataaggacaggttacttgggaaaggagtttttgtttgtgtccacagaaaatggaaagctatggattaaagtgggaaattaccaatatggagccaagtagaaatataagggtatttaatagggaaaagccttacttacagagtgacctagccagcccatgtggcagcagtctgtacagaaagctgaaaagtgaaactgaaagtgcccagccacctgactctctcctctacatcaccctgaccacgtcctataggcgtggtcaggcagacctgtagccagcccctaagcaggtgtggctacaggttcccctacaatggattccttccatactaatatggtttgatcaagcaagaccccctgaagcagtagcccaactgatcctatgcccaaaacagctgaggagatacagtcatagaggactacagccagctttgtgtgttttttcatgatctccatggtatggacatcacccccaaccatcaggaagcagataagaaatgttagtcattggccaacagcattgaactaatataagtctctctgtgttatttggggccataacgtggtgggtgacactcaggcggcttgtcagaaagtacccacatagtggcagggctctggcggcttcagctctatccagggtgtattaaaaaggtgcaccatttcagctagctagtctgcagctgtcttgagccttatagtcccaaactggttttagggtggtgtttgttagttcagaagcatctagttgaatcaagtggaatcaatgaagtagggccccatcttatttctggagagttcaaagattgatgttagggaattttttgttcactgtagagagcttaaacattaatatcagcacagaaagtttaacttccataggtaaacatacagggaaaggtaactataaagatggaatcaagaatgaggaaaattaggattttagacaatactagtcctagattttgttttcttatatcttaaatgaatggccttttgatatgagacagaaactctaaactttatttaagcagcatatttgaatttggagaaggaggaccaagtccaacaaaactccaaagtcaggtttgaattttatgtgaatagggactacaatagtgctgggaagcaggaaaccagaagataagagttcagtataaatattttaccataaatattatatatgacagtatacctcttaataaacttgtttgacttgtgccaaatcttgtacaaaagacctcctgtctccagatttatcttctctatcttctatctttctatctttcttatttcctggaatctcccagtcaggaccctgtcacagaagaatgatttctcagtccagcttaaattaacactaagggtttgtaaaaaccttatttaaacctactcttgtgtaaactgtataattaaatgcaaagaaagagataatagataaaagtttggtagataaaagttagatgatgatgataacagaaagatagatagatagatagatagatagatagatagatagatagatagaaaatagataaacagagagacagagacaaatatattccataagataaaatccacaccctatgtctagataggtcataagcccttggtcagaagctactattttttaaaaaaggccacagtattaaaattactcctaatgatttacctccatgctcaaagatcagataatctctcatccttcaacagagaagattcttcttgtagtagataacaactaacacagaagctctcagcttgctgacatgcagagaattaagactgtgttctaaagagacatctatgtaatagccctctatccactgctaatggatctttacagaagagagagtaaatggttataagagcccaaggggttggataacttcaaggaaatattgttttctgtatactccagtgatgtgaagtatcacttctgaccccatagtaattaaaacatacatatgacctgcacaaacacaagtctgtaaaccattcttgcatggcataagaataatcaaatttgagtggttaggaagctaagaataaagggaatggcatgatagagtgggattgaatataataaaatttcacatataaaattctcaaaaattaatatagtaatatgtaattaataaaatattatatatcagtgaaatatataatatatataaatataaaatatattttaatatgtaagatatattgataaatatgtaataatttaataaagtacctatcaaataatattatgtaaaaagaattaaaatataatataaaaagaatagcttgcaacctgaagctcagaatattaatgctgtattttagtgtgactacaacataatgtcttatcatttatattaaagaattaaatcttaatcgtccccaatattctaatcttacattcatttttgtatattcttttttcacatttcaatctgtagcttaaaataggttagagagtcttttatacttaaccttgaagcatagatatgtgttttttcttccaaagtcaaggtatgaagtatctaatagttattagaaatacaatcagaggactgtatggccttgtaaatgagtacagcaaatttaataaagactctaattcattttgtaactcatcctagtgtacacaatattctttgagtgttatctggctaaattctgatgaataaaaatttatcttttacatttacaaaagtttgtgactcaaatttatttaaattgaattgttaagatattaaaaaccaggcatagtggtatggggtttgcaacccttagaataacctactacttctatttctgtatttaaattacagaaactctgaaatgtgcacaaggagacctatattataaaaggttactaacaggatacagtatttaataataaacaactaaattacctatctttactaatgatatgtatagattaaatttagtaatgatgggaatagaacagtaaaaccacagtaaataactataaacataaatacataattagtatagttttataaggaagatattttaaaattatacacagactgaaaatattatacagcttcaatatatttaaatatagatgcaaagttttatgatacattaagtcacctaaaacaataataaaactacatattgatacctatgtgtatttattcatacatattcatgtgcaatagatatgtaaaatatataaacatgcattgtttaaaactaattgattaaataaatatcactcctgtatggatttgtttttagatagaaaatagaattaaattcatgttaattgatggttaatcttgactgtccacttgacagaacctaaaagtaactaagagaacaaaccaaggcagcatgtaagagggcatttccaggaagcattaactgaaagagaagacgttttcccaaggtttattgcaactttcaacagtaagcagagacagaagtatgaaaaataattggcaccatttacctgtttgtatgctgcttgttggtgggtatattcatttcactgttggctgcttgttcttgtcattcctcgttaaatgcggactccagcttcttcaatctttcaatgtggactgaagaccaattactctattggaatcacctgaaaactccatgccacaatgggactgttgacgcttccagctcactgaaacgagcagtttccaacatcacagtctttccagtgttaatacagccactgtttgactatccaggacatattgtgtaggcaattctaataaatcctcttttataatgtgtattcattctataggttcctttcctctagggcaccctaattagaacatgtcaataattgaagagaacttcaaatgtatctttatccacagtaaaaaaaagagtagatctagtaaaaaattctagaatcaataatacaaccaaaatatatagttcttatatagaaatgtgtttataaaggttatatatttataattctaaaatatggttgtcagaaactttagagtagtgttactacttctatggatttttttcttaataattttaagatcacacacacccaaataagtttgagttattacattatggtcctgtgaccatgagttatcttgttcacttacatcaagaataggacctcttgatatgaggttgctttttgttattgctgttttgtgggattgtttttgttcatttgttgtccaaatgtttgtgtgttgagcagttggttgcacgaatggacatgctgtgaaatggtgttaatctttaaaacttgagtccaagaaagtggccctgtgttaaaggtggcaagtcatcagaaaggattgaaataattctcatgggacatttggttaatttttacaagatgattgtcataaagggcaactctctgacccctcctatttggtgattgcagctttcctcaagtatcaggaatcctcaaattatttcataaaatagaaacagaagcaacattgcccaaattcattttatgaggtcacaggtttcctaatattcaaatcatataaacattcaacaaagaaagagaattacagatcaatttcccttataaacataggcaataaaatgcttacaaaccaaattcaagaatatagcaaaaagatcatccgccatcattaaggctttaatcccagggttgcaaagatggttcaacatacaaaaatcagtcagtataatgcaccatataaataaactgaaagaaaaaaaaaccacatatgatcatctaaatagatgcctcaaaagtatttgacaaaattgaaaacactctttcatgaaaaaggtcctgaagagatcaaggatggaagggacatgcctataattaataaaggtaatttacagcaagcatctaaccaacatcaaatttagtgtagagaaacgcaaagcagttccactgaaatcaggaacagcacatggttgtccactctctgtatctgttctactcaaagttctagctagaggtatgaggctgtatgagatgaagggattacatattgaaaaggaagaaatcaaagtatctttatttgccagtgatatgatagttaatataagtgactctaaatatactactagggatctcctgcaactgataaacactttcaacaaagtggctggatacaagatgaactcaaaaaaaaaaaaaaaaaaaaacagaaaacagtagaccctttatatataattgacaaagtaatgaaggaaggatcaggaaatcaaacccttcataatagcatcaaataatgtaaaatatcatgggataactccaacaaagcaagtgaaagacttgtgtgatgaaaatttcaagtctatgtatcctcatgatttccttttgttgtcttgttgctctagcaatgatttcaagtacaatattgaagagatatggagagagtggacaaccttttcttgatcctgattttagaagaatcacattgagtttctctccagtttggttgatgttggctgttggtttgctgtacattgcctttattatgtttagttatgttcctgctatgtgtgatctctgcaagacctttatcatgaaggggtattgaattttgtcaaaggcttttcctaaatatagtgagatgaaaatttggttttgcagtttcagtttgattatgtggtgaattactttgatggattttcatatgttgaaccatccttgcatctctgggatgtggtacatttacacaatggagtgctactcagtgggataggggaaacaatgaaatcttgacatttgcaagcaaatggatggaactagaagaaacaaacctgagtgaggtaacccagtcacagaaatacaaacatggtatgcactcatgcatatatggatattaagacatagagcaaaggattactttccacacctccagaaaagctaagaaacaaagaaaaacctaagagagacatacatagtcccccagagaaagtgaaatggacaagagttcatgaataagttgggagcatgggggagaggggagcaggaagataggaggccagagggagatagcacaaagatgaggggagagaagaacatgagggatcaggaagattgagtgtggggatcaatagaggagaacaagaaaagagataccttaatagggagccattatagctttaaagagaaatctggcactagtgaaatgtcctaaaatccacaaggattaaccaagaattaactaagaatctaagcaataggagaggggctaccttaaatccagttgtagagggggaagactgatgaacaatggggtcaagatcattctggggaaacccacagaaacagctgacctgagcaagtgggaactcatggattctagacagacagttgtggagacatcataggacactactggggctcctgagcttgggtgattgttaggaggcctgggaaatctatgaggcctcttgcagtggtaccagtatttatcctagtgcgtgaatggactttgggagtccattcccccatagagggttactctttcagcctaaatacatgggggagggccaaggccctgctccaaattatgtgacagactttggtggtcccaccaaggaaggcttcactctccctggggaatggatggggagagggagggaggaggtggggagagggccatcagtggttgacatgggaggatgggagggagagggcactggacttgatatgtaaaatatgattgtttctaatttaaataaaaaagttaaaaaataaaaaaattaaaaagtttgtgtgtgtgtgtgtgtgtgtgtgtgtgtgtgtgtgtgtgtgtgtgtgtgtgtatgttttcagaaaaaaaaaggaccagatgccaatgacgacaagcagcccacatgatccagcaactcagaatgcctctgtttcaatttcctaaacaaatcttcatccagaacaatttcaaagtggctagctaagatgtttcactctcatagacttatccagccaggagttcagatgaagtctatactttcgtatcacacagagactggacaacaaatgatactgctagtttttccagaattttaacattatcccaatgatgtctggtttctctaaagatggtgtcaccattttaggaacatgatgcctacattctcaagaggtggggtgggtgatttgggatcattgatgggttatggatgtttttcattgtttagggggtagttgcaagttgctattggtcatgatcacagaggaaactaagcaaagaaagttatatgcagagatctccttctgaaaagaaaaattggtgggaatattagaatgatagtataagccaggcagtggtaactcacaccattaatcccatcacttgggaggcagaggcaggaggatctctatgagttccaggccagcatggtcttcagagcgagtgccaagagaggctccaaatctatagaaacccatctctaaaaaccaagaaaagaaaagaaaagcaaagaaagaaagactggtaggattaaatggtagatttttgaatgaacttatatactaaaaaaaaaacaactactagtttcaaatattttacattggtatggatttttgtatattgatacaaatttgatgttatttttgttacaacatactgtaagatattgtacacatgcaactcatttaaaattgtagtgtaaatggtaattcttgaaggctactattacaaactatttaggataattaatataacaatgaaacttttagtaagggtttagatgtagacagaaataaactctagcctcatgtattttagatagatgttcttaaaacaattcagagatctacagaatatggcatttaagatgttttttaatgatgtaaggcttttcatgtcagggagatatgtctgctcctggcagcatgaatctgcctcaaaaagtgattataggcatcaaagaaccttcatatggagtttactttcaatgtggcaaagctaaccacttggcaaaaaaaggaacaaaacaaaacaaaaaacctgctcttgcctctactgttgacaacatattgtacaaattggacaggcaggaagttgactgctgaatttttccaagacaaggtaggccagtccttcaaaattcctgcttcacaaaattgtctgtcagatattctgggcccataggccaaagatgggtattccttccaatgttgcagagttaactggccaggtagactccagtaagagatcttaggtatcattactattggttctgtccactctgaattagaatcttctccaggagtctcctagggcaacctgcttagtaccattctaaatactctgccacagaataaggaccacctacagttgcccacacagcttcctttgtctctgacatccttaagccttaagctttctagtaaacacccttctacttctcagcttaggattctttctgggcatccacataacactgcaaagaaacctattcccacagataaatccctttaagactcccccacattgtctagccttctattatacctctaggtttgagtcagtcagattaaaagctcatatcaaaatacaaaactaacactgtaaaacttcagatatccaggtttcatttcaagaacacaaacaataagaaaagacaagacaacatgtctcccccaaataagaccaaccctgtaattgtcaccaatgagtagaccttagacaaaaaatcaaatcacagaattgaaattactattataaacatgttcatagggttcaggcaactcaaagaaatatgaataaatatccaaacgagcttaaaatgaaatgaataaactctcaattgaaatcaaagataacataaaaaagtaccagaataaaatacttaggacaattgaggaaataaccattgaatttaatgaaggaatggaaattctaagaaaaaaaaactgacagtaaaattgaaaattaaaaattgaatgcaaatattttagtgaaaagtctcactaacaaaatgaccttcatcaaagaaaaaatagtagggattaaagaaagggtagaagaattggttcatctaatcatagaaaatacagggtttcttttaaagtgaaaaatgaaaaaaataatctcaagaatggaatatacaggaatggtgggacatataagagaaattcaaatattttaatttgggtacagaatagggaaaatttctagtcaccagcataaaacatatattcaataaaatcatagaaggcaatgttctaaatataggaaagaaataaccacaaacactaagtcagctctacaagaaatactgaaagttgtctttcatactgaagtgaaatataatcggttttaggtgactgtaagggaagataaatggtattaggacagcaatggaaagcaaattaaggcactattgttaaagagagtacatatttcagtcataaacatggaaaatatcaagtgagtattgacctggaagcttcattcctactatctagctttcatggtgctagtgtaccatgaaaaataaaagacccacagacagatattggggttcaagcttcaagctgaagataagagaaggaaagcaaggaagtgcttagatcttacctctacccagctgaaatgacaatcctgtctccacatatccttagaggcaaaaggctctcagatcctgtctcctcctctttatatttctttctccacccagccacatcactcctgtctccaccctcctagagtgagctgtttcttttaagactatgtcaattttctgtagtcagtatggccttgaactaacagagctttctctaacttttaatcctgagtcctgcaattaaaggtgtataccaccaccaactagcttctatagctaactagtatggctgctttgctatttagatctccagtggctttaataaatcatagacaatatatcactacatgctagagaatggtattcaagctaccagaggaaaaaaaatattcatcaacctctaccagctgggaaccttgtgagctacaataaagagtcttcttgcaagatatcaagatatcatttctggtataataatgagatggatgatgtttcagtaaccaaagaacaaccactcttggtcagtttaaggtccattctacaaaacagaactcataccttgtatgagtaaagaacatgtggctagatagatcccaactctaggatataacttataacaattttcctgctaagtatacataatattaaattttttcctaattattcattgctataaccaatgtatttctcaacccttattagtgaagtttttcttgtaataaatatcagctaacacagaatgccacgactgaacaatgttcagataagactgtgcagttctttgtcctaaaatggagcatctctatttcacacttctcttgaaagctcagagatcatcaaggcagccaaaagtatacaagcaaaagtggcagatgactacaaggaaagtgtgtgctagacatgaagagcagatgcacatatgaactcaaagtgattgtatcagcatgcataaggcatgtacaagctcaaatccagcatccactagagaagaacagggattctcaatgtcccaccccagcagaggagatactggcattgggtagttggttggaaaggaaagtcagtttactttaaaaatgtgaacactgcaggctaatccctttccaggctaatcctatattcaggaatatttagacaacggaatttaaatttgatgagaaagatggaggataaggagaggagagagggagaagaaaagagggaggagagagaagaaagttctgtgcatagagtgttaagggtggacctggtgtgagttgggcctatgaatagattatagctaacaggttgtatgagactctcaaagaatttatgaagataataccttggaggtaaaagcaagatatgttttatcttaagttatgcttgttttttgttatgtctttttatttgataaatgagcatatttatggcaggcaaatagcaattattaaaatgagaaagcagtaattatgctaaacttatataacatatatgttttgaattttaatgacacaaacacagtcatattaaccaaacataaatactaggaactcttctcatttctattaaagatcatagtgaatttgatatctataacatggagtatggtatcctttggggatacctacttaagttttccagatgagttttttttcttttatttttataatgaaacaatgttttatataatcatggcttcttctagtctgttaataatcaccattccttttagacattgaaaatattttaattgttcacatttacaactgttctagtaaatactatcatttcattatttatcacatatttcttagtcttttcagtgttgggaactgaatttggtgctttgttcatgactaggtataacgtcattaatgatgtcttttccctgctcctgaatctattttgattatttattgtcacactcattttccaagttttcatgaaagcaaggtgacaaatacatttactcactcatcatgaaaaatatgttatttttccaaacttaagcacacacccgagatcccttgaaaataagaaaagcaaagcaggatgaaaacgacttcaagccaatataatattatgtatgctcaagatactgctgactttttctcttttttcagagtaggcgttcccaattgataaatcttgtttgccactggacatttaatgatatctggatgcttttagggtgagatgcttgtggcatttagtgagtggaaaaaaatacagctgaattttctacaatgtttataacagccacccccgctaatgtgaagttatagactagactcaaatacttctagttcacattcttagtaaaagaaacagaaatttttaccttttattcagatctaaaacctaaggtgtctaaattttctcattttcttctggctttttaaaaatgttttagtcttagcttataaaacttgttttctaaagaggtgacctagggatagaactggcacaggatcttgttgttcctctcatgatcacaagtctaaatttaatgaataatttcaccaggctgatctattctaatccaaccatattacatctctgaggtattcagtgaacttaaatgaagtcatcagtgtgtagctgcaatacaatgcacccagtgtccttatgagaaaaagaagcatggacaatagactacaatggaaggtgtatagcaaatgaaaagaacactccaccgaatttgaaaacaaatgaaaaactttgtcagatgcacacctgacaattatactactagaagatgtatacacacacacacacacacacacacacacacacacacacacacacacatacacacacacctcaataactatcagaaaacaaataacccaataaaaacaggtcatggattgaaataggcaattctaaaaataatttttaaaaaatgtccagtaagccttttaaaactggttcatcatccttagccatcatgaaaattaaaattaaaacaactttacgattttgcttttctccatgcagagaaactatgacaaaaataaaatataatggcaacaaatgctgacaagaatgtgggaggaggtactcttgctcactcttttcaagagtttaaaatggtgtatccactatcaatgtccttggaagtccatcagcaatcggaaagagagcaaccatatgtctcaaatccaccactcctggtttatattcagagaactctgtctcactccaaagacttattgaatcatatttgttcactgttcttctgttcacattaaacaaacaagaaacccacaatgtgatgagtggataatgaaaacgtggtacatacatagaagagaaattttatcaaactctgaagtgaaatgaattacaacatttgcaagtaaacagattaaattgaagaaacttacatgaagtaacctaagcccaaagcatcaaatgtcatgtggtattcatatgtggatattaggaacaagtccttatatatgtattttcatgttggagtatctatggaagtcaggaaagtagaaaagaaacacttggaaagggatggctcaggtaacaaattatagcagaacataagtaataataatgaagatggctggggtgaatgctgagggagtcttttttaaaattctttaattactactcatatttacatatccatccccccactccctcaccctctcatcctccatgttccccacccccccaacccatctcccaactcctccccagggatagtgaggccctcagccagggaacttcaaagtctgtcatatcatttgggggagggcgtaggccctccttgctgtatctgggctgcaatagtatccctccatagagaatgggctcccaaaatccatttgtgctctagggataaagcctggctctgctgttagaggccccatagactgtcttggcctcctagctggcacccacattcagagggcttggttcggtacaatgctgtttccccacctttatcattagggtctccatgctctcactaggtcaggtcgactgtttttgtgggtttctgcagcacagtcttggctcctttgctggtccctcctctctctccacacctggattccaggagtgtggttcagtacttagctgtgggtgcctgtttctgcttcgaacagctactggatgatggctcttggaatggtaaccaaggtagacatcaatctcattataggggaaggaggaagtggaggaggagaaccagaggactgagacaggggaggaatagaagagagcaagaaaggagatgtctttgtagagggagacagtataggtatggagggagatctggcacaggggaaatgttagtggatccacagggatgaccctaagtaagaatccaagctgagggagtcttaatggggattagagtagtgaaaagtggaggaaaggggagagggatggttaaacaaaatgaagtgcacaagacaaatccaaatggaaatctactactttgcaaaccaattaaaaatataaaagataaaaggaagatgtcctgtttggctgtgtaatattgaacttcacagctggaattattaaatccaaatcccactgtacattatgaaatatcttcttgttggtcagggaggccctaaggctgttaaagtgatgtgggctattgtcattaatcttggctttctaccagaactgcttaatcagaccttatttatgagcacaccacataccttcaatgccagatacagagatatcaacctggaactgagctgggagtttcctccctgatggctggcttttatagtgttggagagagaatgtaacgcaggctgctgaaggaaaataggcatcagcagttttacccactttagagtcttatcaactataatatcaatccaccaagtgagctgtgtccacctgcaccatagtggcataactgttttgggaacaactaaggactccatgatttgttttgaggctactctagctaaagaaggagtctacatctgttgctgtagacctactcaaaaactcatggctgagaatatcttagacccagaggaaaactgtctattactgtttagctaaatttaacatagtgccaatcttctttctgaataacagtttattcacataaacaaattctattcaaagctttagtcatagtacctgttaaaaccaggagacacagaggtatgtaactgcataccaaggattgattctgaaggaagtgttaagagttcagctctgaacaggatatctgtaccatatcctgtgatgcccacagtacaacatggaagaaaaaatatgacaaatataagggccactctcaactccactcacaaatgcttttttgcttttttctttttttttttttttttttttgcaatggacagctgataatgtagaggctgatcaatggtcaaagtgctcaaaacgctataaatgagtgagcaatccccactaaaagaaacgctcagtgaacattgaagaaaaggggggcagaggaatacaagatctggaggatggatgggagtaatactataaagttatgtcttctgagcatgacatggtcattgctctcatgtactcatagtatctgtggcaacctgcacagaagcaagccactcaaatttccatcattaatccttttaaagaaaatcattgggctttttgggagccattttatttaggaaaaaaatcttaaaatacttgagatgagatactctaagattacttcacttgctgggatttttaaagacgattttagatttgtgcattttttaaaagaaatgccatattcaggcattatgcataactgtggctttaggtgacacagttactaatcctgtatttgacatctgattttgaaagagtcccaaggccccttggattcagcagatgggatgaaatataagtagtgtggagacctttgataccttatgtgagtttcacttctgctggggccctcagaaaggttacctgtggctcagcttgtctgccactgccatgtggtgttcactgtgtggacgagaacactggaagaagacatgaatgtagatagatgtggaggcatagttcacacggtcttcacttgagccctgtttcctctccacacataaatgttggatgggaggaacgcacacattggagcataatgtgtagggtcatttttgtacttttgtgttttttatgggtgggcttcttttggattcatcaagaactgtttactttccatgtatctgtacagagtacctatccccagcctgcagtgttagctcctcccatgagcagcaaggcctttacctctaagagcccagggctcttttgcaggtgttggaagggcccagactatcttaaatggagcattcatgccctgccccgccccactcaggcctttcccctcaaaccttccaggaaattctgccatcctattctggcccacccctaatgaggaggtgcacatctctacccttctacactgggggcagatgcctaagaaggcaaggaagcagtgtctcccaaactgaatccatctcatcattgacctagaaaattggttgagttgcttgagtagtcataaaacccttgtgggatattacaaatgtgacaaattaatggcttactattttgctaccttaatatgcagaaattatagaaataatctatgaattttctcatacagaaacgaactttagttgtagtagacaatgatataattttgcatgtatcaaatgggcatttaaaaaatagcataattttgaatactgtaaagcttctattcactgtccttttcagattatttatgctgtaacggtaaacttaaattattgatgttgagaaatgcaaagggacgtcgtggctctgtcacatgcccacacctgcaaacatacctcctaaagaagtgagatggaggtggcggcgggggggtgcgtaggggggggctccacaaacaaagcaaccttctttgtgcccagagagaaggtaatgggggcagccagcagccagaagactccgcctttcccctagcttgggtctctctcaaaggccttagatgaacacacatgtgcatgtacacacttgcacgcgcgcgcacacactaccccaaagacggccgtggtgctctctgactgcttccactagtttgggagaattccatggaattttattctggtcttgaggatgtaatcaagaggattccaagccatgtgggaattgccctgcttcctagagagcgggatgtagcccttcaacgtcagaagcacagtcgtttactaggtttttagaagtcctgtctgctcacatcagagaaacagcaggttccaggaatgaagcaggactttttgtagaccagagcatgttaaattctgggaaactatatttcggtttccttaacactctaactatgtagggcttccccccaacccccaccccaccacctgagtctcattgtccctttcagtgtaaagaggcagacactctgggagctgtctcctgtccctggattatatggttcctcacttacccagccacacaggtgggcatttcttttcatgaagcaatataaatacagaatagttactttttcagaattaaatgggtttcatgaaatctgttggtgattgctttctgtgttccccatctaaatcctttgtgtttggatttttgccttctatacagaggactaaagattagcacagacattctgacattgagtaaagtagtatttcacagtgggtggtagaggtcttgtttttctctgttaagaagttgttaaagagtgtatgaagatagtgatgaatgtgtagtgttcgaatcctgtttttagttcttgtggccatctctgtataatgacaaatgtttgtcagggaataaagtgtctagtatcagtagcattcagtgcccttccccttcagggttgagccccaaacctttctttccttttaaggggtgaggggctcatcttagcagcaatcaccaaccaaacaatgaaccaatgggatctatttagtggtgactggatttggcctcataataccacagtgtggccacttgggttcttgtagagatagcctcactttctaccatttccccagaaattgcatcttgccgaccaggaggggcctggagattcctagttggagtcactgggtcattctgaagcagggggtgagggcccagggctggtactgctatgggaagtccttgcctctcctagatccagccttaatgtctgacatcccagcatgagcagaccctgcacaacatgggtaacagagttcctactgtaaacaatgaggacagtttttccaaagagaatgagataccacatcatgtctgcctgttactattgatttgagtgcaaccttagaaaacttaatgtaacacaaacccaggacatttttggaaattgtatgctcttcagcaactttgtgtgaatttttatacaagcactgttttatttattatataaaacataaaaatagaaaaaaactgaaaaagaagctcatgaggctctatccctagctaaggctcaattggtagttgctgattgctgggggtgtagaagaatttcttctttggtgatgtggttaatggtagctaactatgctttggtggatggacccatacccatgcacacatatgaagcatcaactagaggctctgagatgttaaaataaaaatatgaatgcattaagctgagatggaggcatgttggagacaatacagttaattttatggataaaataggagaagaaaatgttgatcatgctaaaatatataaagaactcaagaaactagacatccaaataccaaataatccaatttaaaaatgggatacaaaggtaaacaaaattctcaacagaagaatctcaattgccagaagacacttaaggaattgctcaacattcttagccatcagagaaatgcaaattaaaatgaatctgagataccatcttgcactagtcaaaatggctaaaatcaaaaacaccaatgataccttatgctggagaggatgtggagtaagaaaatactcctccattgctggtggtaacataaacttgtacagccactttggaaatcagtatgatggtttctcagaaaactgagaatcaatctatctcaagacccagcaataccactcttgggcatatacccaaaggatgcactctcataccacaagggcattagctcaattgtgttcatggaattatttgtagtagccagaaacatgaaacaacctagatgcccctcaaccaaagataaagaaaatgttgtacatttatacagtggagtacttctcagtgttaaaaaacaatgacatgaaatttgcaggcaaattgatggaactagaaaaaacatcctgaatgaggtaaccaggaaccagaaagacaaacatggtatgtattcactcataagtggattttagatgtgaagcaaaggataaccagcctatggtccaccaccccaagaagctaggtaacaaggagaaccctaagagagacacacatgtatctcttgggaaggggaaatagacaagaactcccaagaaaattgggagcatgggggaggtatggcagaaggaaaagaggagggggctcatgagggaatgagatcgtcaagatggaggaagtacagacagggaaatcaaggaaagagatatcttgattgagggagtcatttgctagagagaaacctgatactaagtaaactctcgggaattcacaaggataacccccagataagaccccaagcagtagtggagagggtaactgaactgaccttcccctaatcaaattgatgtaagctactgaattattatcatagaaccttcatccagcaacgaatggatgtagatgcaaggttccatagctaagcactgggccgagctctcagagttcactcaaagagatagaggagtgataatatgagccaacggattaagaccagtttgggcataccaacagaaacagttgacctcagcgagtaggagctcactgactctgtattggtcatgggggaacctgtatagaaccaaattgtgccctctgagtgtgttgactccctttgggaagccttaccctctctgaggagtgcgtgggggaaaggggaggggaggaagtgggtacaaggattggtatgtaaagtgagaaatggaattattttaaaatataaaagataaaaagtaatttattgcaaacaagtaagacattctcaaagaaaagactttaaaatattattattattattattaaaaatatatgtacaggggtagagagctagctcagagaataagagtactggttgctcttctaaaggtctgagttcaatccctagcaaccgtatggtggctcacaactacctataatgagatctgctgccttttccagtctgcaagtatacatgcaagcagaacactatacacataattcataaataaatacatcttaaaaagaatatacaaagaaaataaagcagagcccatatgaggacatggtacatgacaactatcttcaaagatagttggtgttattaaacctgtgggccctttgattctgtgctttcaaggtgtagaacagagacatatacttacattgtgtaagtctccccatctgtgacattctgttatgagaatcctatgagacaaagaccatttcgtgcattcactatgaactgtggggaaatggagcttcatgtgtaatagtgttttaataaaaacactaattgataaccctgccattccatatcgtacagttgtactctaagagtagctgtatatgttgcccatagtaataagaaaaataaagaatggggattgtaagaaatttaataactctagtttactggggagaatgaaaagaatgctataaaagtaacaaaataaaatacatgattattaagaagaaaattacacacacacacacacataatcatttaaatggtaatttggagaattgtttctaatgagaccaaatgctgagcctacaatgttttcctattgtattttttttttattttaagtgattttttaaaaaaatctctgttgttctcagatggtttccattagttttgtttcctgaagttttgtaagccatagtttcaaatgtcagtaaatttcaatgaagccacttgagagctttgtttttgaagtgttatacttaattatcattgtttaattaagtattgtttttaagtgttctctagccatcctcctgtactctcaaataacaagtagtactgcagaaacgtgtatggttctatctgtattcatcctatcatggttcatgaattgtaatatttcacggccaaaaatttttagccactatgtatacttcccatttattttctctgtttccacagataacttcgtagcttttccttaagcatggcaagaaggcaatgtttgtacctagtgagcatttcacatcgtgacttggaagcaccttccaaatgtatcttacccctttggtttatatcagagttcatgatccacagtaatttttgtgcaaagtttctggtggcacttgacttttgttctataaaagcagttttggatgggagttgttagtacttgttctttaccaaagcagtagcctagggcagaatccatttcagaaataacctggaacacgatcaaaattatctaccttgttagaagccaattgcaaaggccccagagcttctcttatccttgtgaggacaacatgggttccaaataatgaatattttgttgagtcaccacactcattattgattatgtaagccactataaattaattgggccaaattcccaaacctcttgagcctgattagtctccctcttttatttatttttattttgccctttgaagctaaaaactaaagcatgtctagtaacttcaatataacttctgctcactctgttatattgcgctatcaatgtcttctttttaactttgaaattttcttgtccattattcttcccaaatcttaacagagtcaaatgtcctaaagcattttataatttttacccaggattatctctcttctgtggatatttcttttcactttctcaactgacgtagctttacaatatgtttcagccaccatcagagaagtttcctcctatagtaaaaacaatacagagacccacagccagacattatgcagagagtgagatagaaactttggaacacttagtcctaaaggtaatagctccatcaaagtcctcccctcagagcttagagaaccctgtggaagatgagttagaaagagcgggtttaaaagccagaggagatggagggcaccaagagagcaagggcctctaaatcaacatgatcaaaggtcgtatgaattaacatagactgaagcagcatggccagggcctgctcatatctgtaccaggtcctttatatacaaattatggattccagtatagtgtttttatgacattcctgagtgagtatacaaactagtgtgtctctatcttgtgccttctcttggggtccttttttcttctgttcatttttgtttaatcctggagttttagcttttgctttagcttattgtaattatctcttagagtatttttttctattgacagacaaggagtggatgtagatgagaaggtatatgggaaagggatttggaggagcaaagggaggggttttataatcagactatattttgtgaggaaaaattaccacatacatgtttcctgtttacattgtttcttttaccatcttatcatagactattttacaaataataaacaattgagtataatttcatgcatgttctcaagtgtatacggttgtataattcaaacaccattcaaaataaagaatggttcaatatctagcaagttctcctgaaagggctttccaggttgcccttttctaccttcaatcaatactgttgttatttcaagcaccacagtgtgactgtgtctgctgaaaagttcaaatggatggaatcctattagaactgcacttttgtaccttgccacttgatttagcccagtgattttaagatgtggctatggcataacagatgttagtatcttgctgtattttatcactgggtgctatgttattatatatcactcaagctttcagtcatctggatttattttagttttaactaataggcataacctaagataaacattcataatcacaaattttaatgttttttaaattatgtgtatgtttatgtgtgtctttgtatgggtacatgtacatgagtgaaggtacctacaggaggaagaggcatcctttctccctggagctgtagttacagatagttatagatcacctggtataggtactaggaattgaatctgttcctctgaaaaaagcaacatgttctctgaaacactgagccatttccatagtccctctccatgctttcatacatgcataccttttaaaatctactttgtttggataactatgtagaagtaaattgctggtagacttacgtcttaaaataagttagacatttacactatttgaactaacttttatacctttatcatatagaggatcattgctattgattcatatttgacaatgtgtttttttaaaatccaaaaacattttaaaggacagcttaatgccaaatattaatcctttctgtaagacactaaataattccttgtcactccattcatggttcattggagtggctcatcttctgtgagcttcacatgtagctactgtactgagtctaccatttctgtcttgaaatcctttccttgcacattggaatatcaaattgttttcttcaactcttcaaaagtctcattactttttgtctgttcttgaaaatttgaattaccaatagggtatttcagtgccaagttctttcctatctatctatctatctatctatctatctatctatctatctacctatctatcatctatctatctctaatctatctagattttaaattctgaacttatatttattttattataaaatgcttacatgtgtataataaatgatattctgtgaataacatcattctcatctcaatatttgcttcaaagtcatgatggatttttcacccctgatgtttgaaatccagccataggagtaaatgaaaaggttaactctttgataaggagacatacaggtacattgtcatttactaaagattaaaatgtttcattgttggatgttgagttctgtcatctatggaatgaaaatacatcacttataagtcctcatctttttttctttggtcaataacaaccacagttgaatagagcctctaacaaaaatatgcacatttataaagttggaggtaaaagcagcaactgtcaaaataggtattttagggggaacaagctatccatgatccaaaatcattctgaaaggtagatttctggtgccgttttgagaccagaatgaaaccattattctgctaacaaagataggtcaaagtgttcatatatcaaagccagtttcatagaggaagatgtcaagcttgctgagtgtttgtgcagctgttacactgagccttgaaagtccttgtggatcatttcagtgataaccctgcatgttcgctcaagctcatttttctcaactctttcctcattaagttcattgacttggttttccatttctgagtttttcctatcctctgggccatttgtaacttcaaaatatctgtcaaatccctctaatacactgggtttctaatatatatataatatatatattatatatataattatatatatataatatatataaaacttggtttagatattcttttaaaaaatactacataccccaattccaggttcactcctcaacaacacaacacttacaggtcatatacatttttatataatatctatgtacattatttggaattgggataccatggggcctcacagatgtgctattatgtcctgagaagaaaatattaagcatctttggatgtcaaccctgtttttatgtatgctcagtttcacaaaacaaatgcagcttcctttatcttccctctaccattcacttaaataccctgctacagtactccctgttcctcagacaaggcaaacgctttctcatagctgtatctgtgcccacattgtttttcctatattaaacagtactgttcttcactcctactttatacttatgagttcacattttacaattcatgccaaacctgactatacatattgactggtctcaacattttaaacagataatacaaaaagtgttgtccattgtgacatctctttacagagcatgatttaaataaaactacataaaatttaaaagtcttaaaatttataatgtttatgtgaatccattgaagtagtgttatgaaacatttcacttgtatgtatataaattattaaattagtctatctctgagtcttgcttgtcacaaagagaattgctatgtgaatggaatatgtctagcatcctgatgaagttttagtcttttcaaagcttcagctttgtcgtctcgtttaaatttaaagcctttaggaggagtttgccttagtttaatagcgattatgattttttaggcaaaaatgaaaatgaaaactagtagaattgaggaataattaattgtctcaactacagagtgaaaaaaacaactatataaattatactataggtatggtttttaaacatttgattagtacatatagctatataaaataatggtttttgtgttaatatacatatttctttttttaaatttgaattacaaacaagtttgttttacatgtcaatcccagttcccactctctcccctcctaccctaccaccaccccccaactaacaccctacctatcacatatccttttggctccccagggagggtgagaccttccatagggggatcataagaatctatcatatactttgtgatagggcctaggcccaccccagtgtgtcttggctcagagagtatccctctatgtggattgggctcccaaggtcaacacctatgctagggataagtactgaactactacaggaggtcctgtagatttccgaggtttcctcactgaaactcaagttcctggtgtctgaatcagtcccatgctggtatctcagctatcaatctggagaccaagagctccccgatgttcaggtcagctgtttctgtgggtttcaccagcttggtctggactcatttgcccatcactcattcttctctgcaactggattccagttcaattcagtgattagttgtgggtgtaggcttctacttacaccagctgctggataagggctatataagtcagtcatcaatctcattaccaggggagggtattcaatttagcctctcctctgttgcttagattattagctggtgtcatctgtgtagatctccaggcatttccctagtgcctgatttctctgtaaacctaaaatgtctcgctctattatggtatctccattcttgttatcttctattcttcccctgactcaacctttctgctccctcatgtcctctgcatccctcctcttcttcccttcttgttctcctagctcccttccccctattcccgtgctctcaatttgctcaggggatcttaaccctttccccttctcaaggggacaatgcttgtcttttttagggtcctccttgtttaccagtttctcttgcagatatacacatatttctatacacatttttattatattctctcctccctggctttcctatttatttatttatttatttatttatttatttatttatttatttttattttgttcatttattttgtttttgtgacatggttttttatgtagctttgtagcctgtcctggaactcactctgtagaccaagctggcatttaactcacagagatccacctatctctgcctcctgggtcctgggattaacgttgtataccaccactgcctggctccatttttgttttataacaacttcctctgagttcatatatttcactcaggatcatctagagggacattccttaatgttaaagaagtagacaactgaaattgaccagatacacaaagcccttctctcttcaaccttataggagcaatagaacttctggcttacagagaagcccaactgattcagcaagatgcatatcatccaagatgaaagaagcagagaccatccagtaatacaacagattgaagccagatgagctgcctgattgcaaactcagatttaactgtgttgcctgaaagtgaaactcttcaacatgtccagctgactgctggtcatgccctaatctttaggcttcctggcttcttcagtcttccccatgctggggtggatttatgttttatttttattttatttttggtgatacagtcatctttcagccctttctactcctataggtaactcttcatcaatcttcctctaagtaacctctataaaacacattgttttcataaagttgaactttggcagtattattattatttgctaatattattatttgatgtgtcatatgtcccatatctgggatgagtacccttccttcaagccttcccagaaatagtgtcatagaatactctgccacttccgatggtacctcctaggctatctcccacttctctttccatgtctttaaaaaaataactcagagagcatatgggaaagaatatttgtaggaacatgggtgctttacagtcactacaacactgaggaaagatctcatattctttggcaactataaagagacctatatcactgggaaaagaggtgtccttattgagcctttccagtccagttacagctaattacctctaattactaagtgaagggcatggacttgtgagcccctgccttctccataacaggatgttggagggcccaatgttgggtacatcttgtgcagatcacagatgctctgattgtcttgcccatgtcatgccagggaagtagcactccacaccattctaacccgtcccctggttcttacattccttctcccacatcttctgtggattgttcctaaatcctgaaggtaacaatgtatgtaaatttctcatgtatgcatgagcactcaacagtcacctatcctcatcttcagttcctttcttgcatggaaatgcatgcatgtatgtgatctgtatatttgaatgcatgaaattgctatggtacctgtgtggaggtggaggacagaggactctatgggttcttgattgtgatcttatatcatcaggcctgtgcaataagctgagacaaatctctgtctcttagtctcatgactttgaccatttgtaagtctgtatagctataacttcccactataagaagaagcttttctgaacaaacccaccagcgctactaatctgctttttagattatgtctagatgttgggacctgtatatggaaatccattccatcttgccagaagttcagagctcagatcactcctattgtccttaagacattagcttaagagctgcaggatgtcctagccttggtggtgaatgattcctatctaaataacaatagacttgggcccaggttgttttacactcaccctgaaggctaggtgatatctgcagctatgaagtgcctgaaagtcaagtagtacatgcagttattgagtgtctttagcattaagagaagtaattgctattttcctttataatgataacagaagtctctgccattgtccccaccttaggttggttacttaagatgatgtatgaataaacaaatgtgcattcagtatggtctgaaactgcccccccccccgacattattctttaacaaccatagctagtcttcccttctccacacttccccactcaggaaaagacccagggctgcttgactggtcccgaccaaaccccacaaacaccagtacatgacatctagacccttgtgtatctaaactttccccacagctcctgaaagtgtcagtctttcgaataagttttgaatttgcaatttttaaaagctgtgattgaataagacaagcctgaggttcagctcaactactgcatagtaaagtcaaatctgtagaattcactatgtgcagtgaaactgtcatcatctgttgcatcattcttaatgtggaggcacaaagcactgaagaaatatatgtggatcggaagttaaacaaaacatatattttcatctatgatggaaataaaaacaactctactatggagactaactttacgagtacaaaaaccttagtctcagacttactgaaaggcgatgcttctttgaaaatggataagtgtaatgttgttatgggaaagttatccagagaaggcaaacagtcatagagctgaaataccatatggaattcaactctgaccaaggatcacactgttcttaccacactaccctggcagtatacaggtcctagtagatgatgtaaggagtaggtgagggatggaatgagccaggctgtgatggtgaggagaatcttgcagcctggctgactagcagccagagtgcttctttattcatacagaattcagtaatcagggatacattcatgttgttccaaaacatagatcatatcatttttgtttttaaatatgtttcacttccttttgcatcttttagtcatcactaataaaccatgacaaaacagagttatcttttacaatcattttccctcaagttttgacatcattgataagcatttatttttcataaccatttttactaattaactccataaacaaatttttaagactctacaagcatatgacagactgttctcaggctagtaacttttgtgactacaaggacactagaacaaaacaaaatcttcaagcaggttgggcatattggcatttcccaagcagtatattatgaattctttttttttctttcttttattttttttttgtaattagttcaaattaggaacaagtttgtttcacatgtcaatccctttctccctcttcctcacctccccccacgcctaacccctactcccaacatacccccaccccatccaccctccacttcccaggcagggtaggggggcccttgatggtggctccccaaggtccaccacatcatcctgggccaggcctaggccttcccccatgttccaggccaagagtgcatcccttcatgtggaatgggcttccaaagatacttcttacaccaggaaaaaatactaatccacttccagggccctcctagagtgagaaaggcctcctaattgacagcccatgttcaggggtctggatcagttctgtataggcctcacagacagcagtctggggtcgatgttctcctccttatacaagccagctatttctgcgggtttcaccagcctggtaccgacccctttgatattcattcctccctctctgcaactaagttccacagttcagttcagtgtatatctgtggatgtctgcctctgcttccatcagccactggatgagggctctaggatggcataaaaagtagacatcagtctcattataggggaagggcatttaggttatcctctccatcattgcctagattgtcagttcgtgtcatccttgtaggtctctggaaatcttcctagtgccagatgtctcctcagacctataatggctccctctaatatggtatctctcatcctgctctcctctattcttcccccaacttaatatttctgctcctcgatttcctcctctcctcttcttctctcattctggcagctccctctcccccaccctcatgctcccaattagctcgagttcctgccccttcccattcctgggatgcacatatttttcccttagagttgttcttgtttcctagtttctttggtgacgaggattgtaggctattaatcttttgctatatgtctaaaattcatatgtgagtgactacataccatgtttgtctttttgtgtctgggttacctcactcaggatagtttcttccagttccatccatttgcctgtgaatttcaagattccattgttttttttttttctgttgagtagtagtactccattgtataaatgtaccacattttccctatccattcttcagcaacatctaggttgcttcctggttctggctattacaaaaaatgctgctgtgaacatggataaacatatgtccttgctgtatgaacgtgcattatttgggtatatgcccaagagaggaattgctggatcttgaggtaaattgattcccattttcctgagcaaatgccatactgatttccaaagtggtcttacaagtttgcactcccaccagcaatggagaagtgttcctttttctccacatcctctccagcatagattgtcattgatgttttttatttttgccattctgataggtgtgaggtggtatctcagagttgttttgagttgcattcctctgatggcaaaggattttgagcactttcttaagtgtctttcacccacttcagattcctctgttgagaatcctctatttagttctgcaccccactttttaatttcatcgtttggtgttttggtggctagcttcttgagttccttgtatattttgctaatcagccctctgtcaaatagagggtggtgaagatcttttcccattctgtgggctgtcgttttgtcttgctgactatatcctttgccttagagaagcttctcagtttcaggaggtcccatttattaaatgcagatctcaatgtctgtggaactggtgtaaagttcaggaagctgtctcccatgctaattcattcaagggtatctaccactttgtcttctagaagattcaatgtggctggattcatggtgagatctttgatccatttgcacttaagttttgtgcttggtgacagatatggatctatctgcaatcttctgcatgtctgattccagttgtgccagcaccatttgttgaagattctttttttccattgtatagatatggcatctttgtcaaaaattatgtgttcataggtatgtgggttaatatcagggttttcaatttgatgccattggtcaacctgtctatttttgtgccaataccaaactgttttcagggctatggctctataatagagcttgaagtcagagatagtgatgcctccggaagttcttttattctacagagttcttttggctatcctgggttttgttgtttttccatataaagttgagtattgttctttcaaggtctgtgaagaactgtgttgggattttggtggggattgcattgaatctgtagattacttttagcaagattggcatttttactatgttgattctacctgtccaagagcatgggagatctttccattttctggtatcttctttaatttctttctttaaagaatcaaagttcttactgtacaggtctttcacttttttggttagtgttaccccaagatattttatgttgcttgtggatattgtgaagggtgatgtttctcttatttctgtctcattgcatttatcatctgtatatagtagggctactgattttttgtttttagttaattttgaatcctgctactttgctgaaggtgtttatcagctgtagagttttttaggtcacttatgtgcactatcataccatctgcaaatagtgaaaatttgacttcttcctttccaatgtgtagtcctttgatctccttttcttttcttattgctctagatagaacttcaagtacaatattgaagatatatctagagagtggacaagccttgtcttcttcctgattttagaggaatctctttgagtttctctccatttagtttgatgttggttgttggtttggtgtatattgcttttatcatgattggatatgttcctgctactcctattctctccaagatatttatcatgaagggatgttggattttgtcaaaggctttttcagcatctagtgagataatcatgaggttttctttttcaatttgtttatatggtggattacattgatggattttcatatgttgaaccatccttgcatccctgggatgaagtctatttgtacatggtagatgatttttctgatgtgttcttggattcgattcaccaatattttgttgggtatttttgcatagatgttcaagagggatattggtctgtagttctctttttttagttgtatctttgtgtggcttgggtatcaaagtgattttaaaaggagtttggcaatgtcccttctgcttctattgtgtggaacaatttggggagtactggtattagctcttgtttgaatttctggtagaattctgcagtgaggcatctgaggtaaagcctgttttgaagttgaagtgtgtttcttgcgtacagcagaaggatggattctatctttgtatccattctgttagcctgtatctttttacgggcaggttaagaccattgacattgagggatattaatgtccattaattgttggttctagtttattttggatttattgttggtggtgtccttgtgtgtgtatttagccctcctgtttctttttatgcttggtaaaattggattatcttttgcctatgttctgagtgtagttaccttcgctgagttggcattttccttccagaactttctatagtgctggatttgtggatatgtattgtttaagtctggttttgtcatggaatatcttgttttctccatctataatgattgaaagttttgctgggtacagtagtctgggttggcatccatgctcccttagtgtttgaaggatatctatccaggaccttctggctttaaaagtttccaattgagaagttgggtgtgattctgataggtctgcctttatatgttacttggcctttttcctttgctgctcttaatattttctctttattttgtaggttttgtgttttgattatgtgtcgaggggacttcttatggtggtccagtctgtttgttgttctgtaatgttcttgtactttcataggcatatccttcagtaggttggggaagttttctatgattttttgaatatgttttctgtacctctgagctgtatttcttcaccttctcctatacctattattcttcgatttggccttttcatggtgtcccatatttcctggatattttgtgttaaggatttgttggatttgagattttctttggtcgatggctgtatatcctctattgagtcttcaacaactgagattctctcttccatctcttgaattctattggttatactcacattttcagtttctgatcatttatccagcctttctatttccagcatcccctcattttgtgttttctttattttgtctatttcagctttcatgccttgaactgtttcaagcacttccttcacttgtttggttgttttttcttggctttctttagattctttaagagatttgtttacttcttgaatttttttggtttgtcttttcctccatttcatgtaattttttgcttgtttttttcttctatttctttaagggattttcttatttcctctttaaaggtctttatcatcttcctattaattgttgaggtccatctcttcttcatcctaagtgttgtgcttttcagatcttgctggtgtggagtccctagattctggtggtgtcatgtttgtttttctgtcttcttcccatcccttcttccagtgagtacaagtggggtctctccctctctccagtggcaggcagagggctcagcctctggcagcagccggatggtagagggcaatgggtggacaagggtggggtgtgttgggactcagggtgggccttcccagtctgggaaggtccactctagcccgggtggactcaggcagaagcgagcagtggttgatggggaggttcgggagcagagcagcaaccagactcacctgaggctcaggcacccactatagaacagaggtcagagtgtagacaggggtgaggtgtgaggcgtgtccagattcagggtgggccttccggtctgggcaggtccactcttgtccctattatgaattcttaattatcagaatgctcaagaaaagattcaggcccaagctattgcagttattattcaaattctggcataatacaatatttactttttgtatccttatagaatttgtttatatgtataactctggcattttgttgttcctaggttatatgacaccatggttgctttgcatgtgatgaattttaagaaagggaggtcctgacatctcactttttatgatctttttacatcattctttgattatcaatataagtctcagtgtaaggctgagataacatcagccaatctaactttgttgctctatatgccatgtaatttcctgaatgtgtagtgggaaaaggcatgcagtctgatctgtgtccaactcctctagcccaatgaattttgttgaccttttaaaatttactttgttttgattatcttactcctgtatagggacagatgtttcaggaaaatcccatagcctcataaagtgacctctggcttctttatgagtgtcacaacctccaaggcataagcaacaccttcaaacagataaggatatcttcctaaaattggaagggtagtatgttcaagactttcatgtggaagtttagaagcagtacacctgggaaaaggcatatatgattcataagaaattttccatcaattcaatatccccaaattatccaaatagtaaaagtcttctacatatgcaacaggagaagatgaaaaccaagggtggcacagtggccattatgtggctcagctttacctgatatttgtcatgtggatgttctggccttttgacttttgccatttccatcagatatggctatcccaataagggacttctttgaatgctggtttagattagtttaggagaattatttcacatctgggtatttgcgtatttgtgtatgtttgcgtatttgtataaatgtgattcaataatttctatatgagtacatagaaaaataaaggttctcccatacaaaccgctcatatttgtattgcttaagacttgcaatgctcagcaaacactaagatgttgtatgaaaaatctgtcgtacctagaatgctgagtggaatgctgtgttaatctctgtggaagttttattctaaattgagagtctaattttagtaatgggctctgacatgaagaaataatagagaaatttctatgtagggttccctggaatgttaggcacaggagagtgattaacagaggaaagatttccagggtagaaatatagcttagtaggtcaaacctttgctttccaagcctgaaaacacactcagcgactcagaaacccatggaaatacaaaaggggagaacccactctacaaattgtccctcagaattgtacatggcatgtggcaggcatgcacatagtaactatcatacatacacatgataatagtatatgaataagaaaaggggattttttataaaagagaacaagtaaaattgtttcagtctaagaatttgaagccagtataagaagctttaaagcccttgaagaatgaaaaaaataaaaataaagattctcagaactgactaataatttgtagagtagtatcccttgagcacaggataaggagcagtacaggtgaatcatatggtagaaatagttttagtttcctgagaattccccataccaatttatagtgaacaagttttgggctataccttagccatttttatttcttctattgaaagttctctgtttagattccaagcccatttttaaaatttagtatttgcttttgtaattcaattctttgtacattcttaatattaatcttctgtcacataaataggtgtcaagttcctctccctctcattttatggttttttttttcttcttatctatcagtttcttatctaatcaaaagctttgtaatgttatgaggccccagttgtcagttgttgacttctacttttttttttttttttttgacaaacagagttttgtttagaaagcccttttctgtgtctgtatcatatagggtatagcctgtgtattctgaaaggagttttagtaaattgtgtgtgaaataaaggtattagatccacttggatttatttattgtacagagtgatagatatataaccaatttccctcttctgcatgtagaaatacacttttcccagcagtatttgttgaatatgctgtcttttctccagtatatgtgcatttttttctctttgtcaaatatcaagtagatgtagttatgggtattcatatatgtatcatctgttttatttcatgggactgcatgtttattttgtgcaagtaccataacaaacaggttttattactatagctctatatactatattttgaattcttgaatagcagtctcttcagtattcattgtttggctcaagattgctttagctctctgagatctttctgattatatataaaatttagtatatttttatgtttgtgaaatatcataataattatgggtgtcttaattaggatttcattgaatctgtaaattgcatttttgtgagatggcctttttttgcacatttaattcaagcaatctaggaacattagattcctttacatttttctaatgtctttttctatattttttaagagatttgaaattttcattgtggaagtcttgtacctctttgggtaagtttatttcaagacattgatactcttataaatggaagtgtgctcataatctcttcctcagcgtgtttcttaggagggtatataaaggctacttatttgactgctgggagaagaatcagcttcttatggagaagagccctttcttgtctgtccaatacagagagaccatgaaactctatacaaacaaataaaaacagttattaggttttatttaaatatatttgggcataaacatgcatggatgtatgcatacatatatacatacaataaaagataaagtaaaatatggtgtatgggggtgctggagcacagaaagagcatttgaaagtgatataattctgtttatatttaaaaaaaaactaaaaaggaaggaaaagaaaggtagtcactgctgagcaatggatggggacaaatgagaaggcttgacttccccacttgctaagttcgactcatctcttcaagggataagggaaaacttaccctagaattagaaacagacttctatttcatttaaacacacacacacattatgaataataatttatattataacagttttgtattatcctaggttattactggttaactgataaaaaatgtaattgtaaatttgaatcatcctcatatcttgaaattagagtaacaccgtatgtattttaaaggtgcatcacataacacacaattcacagacttcattttctaacatgtgcactaaactaagtcaaactcagctcaaattactttcttcaatattggtccatgaactggataatccaaaatcagctaccagctttaaaaataatttaaactgaactcaattaacaatggtgaggaaaacatgatgaatttgtttttctaaacccaaatgatagcagtaactgctagaaaaagtcacttcaaggctctggaagatcaatcagttttataagaggtagctgaagtgacccagctcaaactgctgtggagttcagagtgtgttcctccaactacaattcttttatgttcgaaaaggaacatttttcaaataaagcaagacatgctttctcattgcaggaatgaaaaaatgttttcatattaaaaagatgaaagtcatactttcctcctttttactgcttatggatagagaaaatatttttgctatgttacctgcttgtctttgtcaccctgccagattgttagtacagaaagattaaattaaaataaattggtagaatgcaacctgaaaaccttaaattgtaaatgtttgtataagcagaaaggtttaaggcacttagaactgatggcacaaaccagaattaggaagaaaatacctgtccattcctgtcttaacttaaagaaatgaagcctgaatctctatcagacagtgaatttaaatttcaagttaatgcactgtgtttgaaatcttaactattctagtagctttttattaaatttttcctaagattgtggcaccatataccagtgaaatcaataatgactccagcactcatcatcaatcatctcatgtatttaagagtgcaaacaatgtttaaagaaacacattcttgcctctctctctgccctgctaggagacacatgaagccaggggactgctcacagcagatcccatccaggcgggatccaacacaaccagagacttctaagaccctggtaccagtcctgcctccatccatggaaagaagagatacatcagagtattggacctgtttgcacctactggaacagaaccttggtcgcatacccaccaggagaggaagagactccttctaaacccaccagaaaaagaaagggaagaagacaaaataaaaatacaatcaacaacagaaaaaccaatatgacaccactggagtctaggaattctatagcagcacaacctgaatatcataatgcagatgaagcagaagagaatgaccttaaaaacaacttcatgaaaatgatagaggccctcaaagaggatatgagaaaatcccttaaagaaatggaagaaaaaaacaaagcaaaaaaaaaaaatgcaagaaatcaacaaatctcttaaagaaagcaaggaaagccagaaaaaaaaaaaaacaatcaaatagatgaaggaaacaattcaagacctgaaaactgaaatagacacaataaagaaaatacaaactgaggaatactggaaatagaaaagctaggtaaacaatcgggaactacaggtgtatgcataaccaacagattacaagaggtggaagacagaatctcaagagttgaagatacattaggagaaatagactcatcaagcaaagaaaatcttaagtctgacaaatccataagacaaaatatccaggaaatatgggacaccatgggaaaaccagacctaagaaaaataggtatcaaacaaggcgaagaaacccaactcaaaggtgcagaaaacatattcaacaaaatcatagaagaaaactttcccaacctaaagaaagacatgcaaatgaaagcattagaagcctacataacaccaaatagagtggaccatgaaaaaagtctcctcgacacataataatcaaaaccccaaacatacagaatgaagaaagaatattaagagcagcaaaaaaaaaaaaaagttaagtaacatataaagggaaacctatcagaattatacctgacttttccatggaaactgaaagccagaaggtcctgaatagatattctacctacactaagagacaatggatgccagcccagactactatacccaacaaagctttcaatcaatatagaaggtgaaaacaagatattccatgacaaaaccagatttaaacaacacatatccaccaatcgagccctacagaaagttctgaaaggaaaagtctaagccaagcaagttaacaacaaccagaaaaatattggcaagagataataccactttaccaacagccaaaagaaaaatggactggaaacccacacacaatttcaccaccaccaacaccaaatccaaaacaaacaatgatgaacaaccaacggccattatatccatcaacattaatggtcttaacttgcctataaaaggacacatggtaacagaatgtataagaagacaaaatccatccttctgctgcacacaagaaacatacctcaactttaaagacagatggtacctaaaagtaaagggttggggaaaaaatttccaatcaaatggacccaagaaacaagtgggggtagcagtactaatatctaacaaattagactttaaatgaaaaaaatcacaagagatgaaggagatcacttcatactcatcacaagagaaatccgtcaacatgaagtctcaattagggacatctgtgtcccaaatacaaaagcattcatgttagtaaaagaaacattactaaagctcaaatcacacataaaacctcacacacttatagtgggagacttcaacaccccactctcaccactagacaggaacaccagacagaaacttaacaaagaaacagaggaaccaatagaagttgtggagcagttgggtttaacagacatctgtaacattccatcaaaacacaaaagaatataccttcttatcagtgccagatggaaccttctgtaaaatggaccacaaacttggcaacatagcaaacctcaacaggtacaaaaaattaaaataactgtctggatcttatgagaccaccatgctttaaagttagaattcaacaacaacgcaaattgcagaaaacctacaaactaatgaaaattgaataacacccaattgcaccattcctgggttgaggaagaaataaaaaaagaaattaaagacttcctagaatctaatgagaaggcagacacaacatacccaaacttatgggacattttgaaagcagtggtaagaggaaagttcatagcactaagtgcctacatgaagaaactggagaatactcacactagagaattaactgcacaactgaaagctctagaacagaaagaagccaatgcattccagggagtatacaccaggaaataatcaaattgaaatcagaaaagtagaaactaggaagcaatacaaagaatcaatgaaacaaagagttggttcttcgagaaaattaacaagatagacaaacctttatccaaactcacctaatggcagagagtgaacatgcaaattaataaaatcagaaatgaaaagggggacataacaacaaacactgagaaaatccagataatcatcaggtcatacttttaaacacctgtattcctcaaaatttgaaaatctaaaggaaatggacaagtttctggacatatttcacttaccaaaattaaatcaagaacagataagcaatttaaatagacctataacccctaatgaaataaaagcagcagtcatcaaaagtctcccaaccaaaatagcccagggcaagatggcttcagtgcagaattgtaccagaaattcaagaaacagctaataccaattctcctcaaatcattccacacaatggaagcagaagggtctttgccaaactctttttaccaggcttcaataactgtgatacccaagccacacaaagacacaactgagagaaagaaataaagaccaatatccctcatgaacattgatacaaagatactcaataaaatactgacaaatcaaatccaagaacacatcagaaatatcatacaccatgatcaagtagcttcattccagggatgcaaggatgattcaacatacgaaaatccatcagtgtaatccaccatataaataaaatggaaaaaagaaaattacagaccaatatccctcatgaacatcaacacaaaaaattcaacaaaatgctctgcaaatggaatccaaaaactcagggaaatcatccaccatgttcaagttggcttaatcccaggaatgtagggatggctcaacatatgaaaatccttcaatgtaatacaccatataaataaaatgaaaaagaaaaactacatgatcatcttgctagatgctgaaaaagcctttgacaaaatccaacatcgcttcatcataaaggtcttggagagatcagggttaacaggatcatatctcaacataataaaatcaatatacagcaagccgacagccaaaatcaaattaaatggagagaaacccaatgtaattcctccaaaatcagaaacaagacaagtctgtccactctctccacacctcttcaatattgtccttgaagttctagttcaagcaataagacaacaaaaggagatcaagggaacacaaatcgaaaaggaagaagtcaaactttcactatttgcagatgatatgatagtctacataagtgacccaaaaaactctaccagggcgctcctacagctgataaacaccttcagcaaagtggcagtatacgagactaactcaaaaaaatctgtagcccttctatatacagataataaatgcactgagaaagaaatcagagaaacatcaccatttacaattgctacaaacaacacaaaatattttggagtaaccctaaccaaaaaaaagtgaaaaacctgtatcctaagaattttccgtctttaaagaaagcaattaaataagataccagaaaatggaaggattgcccatgttcttgaataggtaggatcaacatagtaaaaatggcaatcctgccaaaagcaatatacagattcaatgcaatccccaacaaaatcccagcacaattcctcacagaccttgaaagaacaattttcaactttatgtggaaaaatgaaagacccaggatagccaaaaccaccctgtacaataaaggaacttctggaggtatcaccatccctgacttcaagctctactacagagccatagtcctgaaaacagcttggtattggcacaaaaatagacagatagaccaatggaatcaaattaaaaaacctgatattaacccacacaaacatgaacacctgatttttgataaagaaactaaatctatacaatggaagaaagaaagcatcttcaacaaatgatgctgtcacaactggattcagacatacagacgattgcagatagatgtatatctatcaccatgcacaaaacttaagtcctaatggatcaaagatctcaacttaaatctatccacactgaaccttccagaagagaaaattggagatacccttgaacgaattggcacaggaaaccactttgtgaacataacaccagtagcacagacactgagattgacaattaataaatggaacctcctgaaactgagaaacttctgtaaggcaaaggacacagtcagcaagacaaaacaacagtctacagaatgggaaaaaatattcaccaaccccacatttgggtgatctccaaaattgttagcagaggaatctaaaatggctgaaagacacataagaatgtgctcaaaatccttagccatccaagacatcaagacaactctgagataacatcttactcctgccagaatggctaaaaccaaatacaccaatgacagtttatgctggagaggatgtggagataggggaacactcctccactgctggtgggagtacaaacttgtacagccactttggaaatcaggaaggtgattcctcaggaaaatgggaatcagtctaccacagatccagcaattccactcttaggcatatagacaaaagaagcacattcatacaagaaggacatctgttgaaagatgttcatagcagcattatttgtaataatcagatcctggaagcaacctagatgcccctcaactaaggaatggatagacacaatgtagtacatttacataatagagtactactcagcagaaaaaaaaatcaatggaatcttgaaattcaaaggtaaatggatggtactagaagaaaccatgctgagtgaggtaacccagtacaaaaagaaaacatggtatgcgttcactcacatatggattttagacatagagcacaggattaccagcctacaatccacaccaccagagaatctaggaaacaaggagtagtctcaaagggacatacctggtcccttgaagaaggggaaagagacaagatctcctgaacaaattgggagcatggaggaggggagagaagctaggagaatgagaaggtgagaaagcaggcatgttgaggacatggaggagcagaaggttgagatgggagaagaatagaggagagcaagataagagatgccataaagagggatcccttattggtttaaagaaagatcagacactaggaaaatgtctggagatctacaaggatgacactaactaacaatctaagcaacagaagagatgctaccttaaatgcccttccctaataatgagattgatgactaacttatatgccatcctatagactgcatccagcagctgatggaagtagaagcagatgtggacagctaaacactgaactgaactggaatccagttgctgagaaggaggagtgatgagcaaaggggtccagaccaggctggtcaaacccacagaaacagctgacctgaacaagggggagctcttggtcctttgactgatagctgggaaaccagcatgggcccgatccagaccccatgaatgtgggtgtcagtgaggagtcctcagaaatctatcaatacttatccctagcataggaatgtactttgggagcccattccacatagagtgatactccctgagcctagacacacagggagagggggccgactaggccctatcccaaaggatatgacagacacttaagaccccctttgttacacctcaccctccctgaggagcagaaatggtataggataggtatgttgttacttgcgtggacaggggagggggggagggagagggatctgggatcaacatggaaaacaatcttgtttctaatttaaattaaaaaaatggttaaaaagaaacacattcttgttctttcatagatttagacgggagggaattagaaggtaggactgccccacaagaagttacatttgacatctccacgtggcttggaaatcaaacatctaacagaatggtgtctgttggatggtttcatattgcacatggacctctggagataacatgtatacatagacatacacactcatgcagagagatgtgtccttaaacacattcaggaagaagaacattgcttttcatgagcctgtacttcagtatatcctgctttcagtggaagcatgcttttcctaaagcaaacaaattagtatatatacttgcatacttataaccgcagtctctgagagccttgaactcagtttaaatgatctgcagtcttctctctgactgcagatggatttccttccttacacatgtacagtacattaagtatttttgtaaggcaggtctggttttgttacttatggagtcaacctaaagtctaagaccttgtcacatgaattgtattcaagtaagtatgatgttactgagacacaattctccttgcacaagctttctgactttggagacttgcaacttgcacacacacacacacacacacacacacacacacacacacacacacacacacacacacagtttgagtagcaatataacaaaacacatgaatacttctgtcagtaatgtaaaaatttcaataacacaagttctttgttcagactttttacccagtccatggaagatgtcaagggcagtcttctctgcaaatgtttacaggagctctgtcatgccttgtactgggtaatgaaaaaagtcttttgaaaatgagaagaataaacactgtatcttctgaattgtttctatcaggtgttatcatcatcacagtcatgaatatgtaacagatataatagtttattccactgcagtagttaacaagaagcacagtacagataactcatctctaagcaaaaaattctgtaccttttgttaaccatcaaatcttggaaagacatttctgatacctgagttcattgcaagatagagagctcatgttataaattttaattataaatggttatgatataaagaagaggctgtttagctgctgaggagtggaaattagtgattccaaaaaccttttgaatttaaccatcacctttttctaagtgtggcacagacatctgaaagcatttcctatatatccctgctagattcctcccctgggcactccaggtcagcacttggagtgcagtgggaaatgggtgtttggagatgatgttaatcagcagctctcattatgtatctacttcagacatttccagtctaccatctgcaaaggcatctgctaagtcaaatatttatgttttctaatatcttgaatgggatgtagatggaaacagttcaaatcatccagaataaacccaggattaatactaggctcattattatttttcctgagattgtacctcctttttgttatttaaggccactgatgatctccttatgatattttttcctaagattaagtccaatgttatgaatagtgactttttatgtgtccataattgatagtcttttcttttgtctgtatttcttttataatctataatcttaaacaccttactctttatgtatttttagttcttatgtcaaaatgtgcctctctgtatgcatttctgtgcatttatttgtgtatatatcttatataatctgaaagtgagaattacttttcttttatttaatatctatctgtcttggggctgagaagatggaacacttggtgaaaattcctgtcaggtaattatgaagccctgggtttgggtccccagtaccaacaaaatctaggtgttgatgcatacctatagacatatgtagacacattaagcacattggccagctagactaatcaatagatgcactttaggtttggtgacagataaagagtgtgggagtgagtatagattatgaaaccagataaaagcccatgacagtgaccgagaggtgttaataaaggagatggcatagaaggctacatgtgatattaaagcataaaagtgactcttagagatgggagatgcaggagaaggaggggaatggagaagagctgaggaatagaactaacaaaactacatcttattggagaatgccataggggaatctgattccctgcatgccaataaaagtttaattaaagcactaaatgtgtcaagtgattgaggagacacatgatgtcaaaatctagcatccacaaacctctacagcctctacagacatgtgtaattttaaagcatacacatgtgtgcacacacaatgcaataaacataccacaagatatattaaacaaaatatatacttattacaagttgctacaactatgtatatttcaattttgtcttcacaagataaaatacaataaaatacatttatctgcatttgttaaactattaatagttttcaaaaccaggtacttatttcccgtgctgactcagaaattctaccaaatctatctatacagcactgttattaaaaggctcaaaacacccctacttcacacctaaccaacacaggaacctccttcattgttccccttcatgttgtcaatctggtaaaattcctaaaatacagtagtgttatgaccctatggccttgagaatatattccatcaccatggaaatgtctgctgatgcttcattccatgtggctggtgcaaagaggaaatcaaaacattacatctcttagccccatctacctaggaaattttcccgccatggtattcttacatccaaccctaaacagaattctcagagcccttccacactgatgttaatgccacagcagaatgcagaacaagtgaaatataatcacacaaaaagtcacaactcaacacctaactctagatgtccagatgccattgaaaatggaatcaatatatataatatatattataaaattttaaaaatataatataaaataaatataacttaaaatatttataatacatacatacatatgtgcatataaaatcaatgtgttcataccaaaaatccttaatcttgtacaaatgagccataaggagaacaaattaagtaaaatgcaagacataaaaatcaaaagatcagttataactgtgttcaaatgttcaaagaatttaaaccacatccaaataaaggactgaataaacttagacaagacaggaataaactgattgaagtccaagaaaacatagacataacaaatggatggaagaattaaggaaaacaacttaggatatgaaaatataatccaataaaaaatagaaacacagaagtaaacccacactaaattgaagcttcaaatgaaaaattcaaatagaaagctcagtagaaaatctaattaacagaatggatcagatggaagaaaaatatcaaggcttcagaacaagacagaagaattgtatcattcaatcaaataatatgataaaatttttaataagcacatgaataagaggcatcatctttggacagtatgaatacatcatatctttgcattctgagcatagaagatttctaggacaaaccatagataatttctatattaatatcatagaagaaaactgcccaaatataaagaaagtcaggcctatccaagctcaggagccttcagaatactagaaagacaagattaggaaagaggcatggcaaaatccattacagataaaacactgaaatgatagaataaagtgtttagaaaactctaagaaatgaggacaaaatcacatatgattgcaggcatcttcaagtaataatagtctgttagaaatatttaaagcccgtatgcttggaaaggtggatttcatgttctaaaatatgtaaattactaatccagaatattatacccagaaaaactatctttcatgaatgaaggagatggaaaagaatactctgaatgatataaacagattaagagaactcctgaccactaaacaagctctgcaaaggttaccagcagaaataatttggacaatgacaagaataaacacccagagaccatatgggaaaaataaccaatattaggagaaccacaagattctaagaatatgcaacaaaatcaacccaacaacaggaaaaatgtacatatgtctgtagtagttctgaatattgatgttaataattcccaagtaatagtcaaagataatgcactgccttagaaagcaggactcataattttgctgcctaaatccacttcttatcatcataggtaaatattatcttaaggtacatgaccagaaaatcaggttctacccgaatgaaataaaaaaacaagccaattcattttattctaaaatttgaaaaaaaataggcttcaaaccaaaactagtcaaaagaaataaaaaggttatttcttatttatcaattaaaaagaatagtacaattctagatatatctgcactaggaataggcacatccaatttcataaaaggaacactagtatatacaaagttacagattattatgaacacttaatatttttgtagcacaaataataaaaactcagaggcagattttggaattcaaggtgaagatcagaaaagtaaagcagccagccagtagctcttacctctaccaagactcaaatggagatcctcttgtcttccctgtgcctacaaactgaatctaacatgagacctttgcttcttccttttatgcttctctagtgcttggatgaaaggtgtgagcgctattactcttttagagtgattcattcactcttgtgtagcacagagtagtttggattcatccagatccatctgcctctgtctcctgagtcctggaatttaaggtgtgtgccaccactggccagcttctatggctaactaatgttcctgtctttgcactttgaacttcagtgactattagatcatgaacaatatatggccacatatattaataaggctgtgaaagttcttagcaggaaattgccttgttcagtttaattttgaattttttatgtgtattttaatcaaaactctatgaaacattttagggaactctggaacatctatttgtatttgggagaattctgcttttcattatatttaaacctaccaaattatctgttgaaaatctagcagactatctagcagatgcagagattcacagccaagcactgggctgagctttgggagtcctgatgaagagagaaaggacagattgtacaagccagggcaatcaaggtcatgatggggaaaccaccagagacagctgaccttggctcctgggagctcatggactctagaccaacagctagagagccttaagagaccgcatttctttgcatagtccctcgaagaaggggatggggacaagaacccctgaccaaattggagcccgggagcagggagaggaaggagagtcttcatccagttactgtttgaatcagaaacacacacccatagctaagcaccaaaccatactactggaattcagttgtggagagggaggagggttgagctaaggaaccaagacagggttggagagacctgcagaaatagtggatctgacctactgatagaatggagaccctatcataaagctagggaaacagcattagaccaaaccaaaccctctgaatgtgggtaccagctagaatgccaagacagtctatggttcttctgacagtggagccagtctttatccctagagcacaaatggactttgggagctcattccctatggaaggatactattgcagcccagatacagcaaggagggtctagatcctcccccaaacaatatgacaggctttgtaggtccttggtagagggcctcactatccctggaaaggagtcagggggggtggattgaggtgggttgggtgaggaacataggaggaggggagggcaaggaatgtatatgtaaatatgagtaatcaaaataataaaaaagtaatgtaaccccccccaaaaaaaagtgaccgaactagtctctacatgtgtgtgacacttgtatatcttggtctgtttgtaggactcctaacagtaggatcaggccctgtttgtggtgcttgaactggctttgggaaacctatttcccatgctgggttttgcccagtcttaatgcagggggaagagcacagtcctgactcaacttgatgtgccatcatttgctgtcacccatgggaagctggtccctttcttaaaggaggaggagtggatggagaggaagtaagtgggatccagggggaatggggcagagagagaggagagagtggaaactggtcattatgtaaaacaaataaaaagttaattaataaaaaatctgtttctaaaattatctaccagaacattttgatattttagcattttgtttgtttttggatattgttgagaattgagtacaggtttgagctcattcttgaccacccaagttattgaatcatatagatagctatgtacaacatttaaaataacaaaagatagccatctgctttgaatgacttggtcataaatgttgttgaatctctcaaacattttccagttttttatgttagtattagtatattaagtgtaacatttccatgccaaaaattaatgtaaatatatgtatttgaaatttttcttcattatagttttttattatgattgtggcaaaagaatgaacaaattgcaggcatattgtcctagtatgtcacagaaagaatagcattacacaatctacttttatgtccatatttttagagagtactcttaaagttaaaaataatagaaataagttgagttcattgtccttttttggttccatgtctttatgaaattgtgttatttctatgtgggagctggaagaaatgatatttgagatagtcttggtattttgtggtgaaataggttaaataattatatatgataatctaggtttctattttgccttgcttgtcaaatgtagtgcctgttttagtcatggatcctgacaatatatacactgattttttatatgtaatattccttatcatattttactttgaaagtccatttatactacaaaaggtctccacgatttatggtatgaccaccatataatatatttattataaggagttgcctttgaatactgatttttgtcttttctatatgaggtcatgtaggatctttaggggtgtgttcattaggacaattttgcattaacagatatctaaatgaatatcctcaaaacatttataagaacaaggaaaatgatgtgtctatcattattgaagggagaaaatcacatttgacagatttgacatgaaaagtcaaagcaagagctcattatgacttactcaaaagcctagtagtgaaagtattgtcacctgcatgtcctcaggagacctttgccatctcttccttaaaaggaattgtactcatgttttgttcaatttgtacagaataaaagtaaataatacatgtttcaattgcatcatagcttttacatttctgaataatgctccttaactcaagatccttattatgttaattgaatatacacttctgaataaaactgtatgattcatacaatgaacataaccatatgtattgatgagaattttaaaatatcttttttattcatcattttttatttatgtaacaaccacagcttcccctttctcctcttctcctgttccctccccccacctcccttctaccaacccatccattccttccctgtctccaatcatatggagtaaggcctcccatgggaatcatcaaatcacagcatatcaagttgaggcaggaccaagctcccctgcaccccgcatcaatcctgaacaaggcatcccatcatagggaataggttccaaagagctagctcttgcatcaggtacaggtcctggtcccactgctagaggccccattaaaaaaatattacataactgtctccaagatgcagagggcctatgtcagtgccatgctagctagttatcaatctagagtccttaagctcccacaagctcaagtcagctgtctctgtggttttacccatttgcagtagaaaaatatgttaatataaacatataagaattcaggagtttttgttagaaagctctgttagggattaaaacttatgagaggatatatgaatgaacatcaggtagaatgtctcttagaagctgctcgtatggtgaagcaaattaaccaaagaacacttcattactatcataaatcttacttcctcatagcacattttccccatcactccttaatatttgtgttcagatatgaatcgaccttgatttgttatcttgatatgccttctataatattcatactaatatgagttgtagagcttttcatttcatgagacaatgtattttgccacattaaaatttgatagtacttctttaatatagctttgatatatagttgagcaaatttttgacaactaaagtcaaaactctaatttaacattttcctgatgattgtttagtagagctccatggaaccatcgatttttatcacatctcacttcatcagtaattctcaactttcctaatgctgtaaccctttaacatagttcctctcattgtgatgacacccaacgataaaactatttcattgttactttataactgaaattttgttaatgctatgaatcatatctacccccaaagaggtcacgacctgcaggttaagaaccactgaactagatgatgaaaattttattttgatacaaatttgggagaaacaaaaaccctttagacttgtagaaaattctttctgtcaacatccctgagcctttgcaggaggcagtacagtatatatgtttcatttaggtagaaatattctttaatctctgtacagttgccagttgtggttctctgtgttggtaatcgtcaactgtacacagaagcttttctgataagggtggatatatgctgtgatctatgagtataatggttggttaataggagttggtttaataatttttttcatttagcagaataatagtagtagatgttcctctaaggttatgatatgtctagccatagggttttgatatgataatggtgtgatgtgtggcttttatcttctggaacagacttaaaaataaaatcagaaaatggctgattattcccatgacttagtgtccctcttgcagtagtgggtgtatcttgccagaacaatcattattgtagctcacaagagtcacagcttgtaagactactggtgatcgattttctctcctagtatatttgaactgttaagaaaaatgaaattttctggtaagtggttggaactggaaacagtcattctgagtaagatatcccagggccccaaacgacaaatgtttttttttttttctcaattgtgtgtattaactttgaataattaggttcatgtgcttcatttggaacaaccagaggtcagaaaataactaaggaccatgtagtagtactttcaaaagagtagagatagaatgtgctggtacttgaagggtaaaaggggaataatggaatgggataaattgatatgggggaggagagacactggttgaaaaaggaaactaggagggataaataacacaactttttaaaaagtcattttgaaacttagaaagcttcctaaaatatgtctgtgtatatacacgcaaaaagttaaaatagaggtatctttaactgggtagcaatgcccctactagaaaaccagaagctcatacataaaaacctggtcttgggaatgggttgcttgttttggaattttgggcaggtaagatcccagatacccccaaatactttaggttattccattgctgtcagttctgtctagaacttgcagttaaaaccctattgctgaagataccatacactttatctgtaggagagaaaactcaaggtggtactattatggaaacttcatccctactagctaactgtgttagtgatgcaagatgttaagaattatagtaattccaatgattaaaacaattatataattggttactcctatgtttctactatttgattttgttttttttttaaattgtcttaaacaacagtcattgcctaagactattaattcaattagttgtttactcaattagctactgaatctcactattttctcctctactgttgaaatctgatcttattttggactgggactattactaaagccatcatttgatgattacaaagttttcagtttttatcctacagcatttaaatgcaacatatatcttaagtcaaactttgtattgaggaattgtttatccactacctttgttgatttaaaaatacttttaacttttttatggtactaattttaatcatatttagcttttatgtttttcaggtaaaatatctatgtttttagacaaggaaaaaaagcaaaatctttaattgagccatgtcagaaattaaggaatgattaatgaacaaatataaaagtaagaatggttagtgttgcttgtattttttcaaatttgaatatcttaattgggcaaacctttaggaaatactaaaggtaacgtgaattttatcttcacagaaaaaatagatgtggggggggcaaagggaattgttggacaagcaacacaattatctcttttaacattgtatctctttgtttaaaaagtcaataactacaaagtaataaaaacatatttctgtaacatattaaaaatcataatcaggtggtggtggttcatgcctttaatcccaaaacactggaggtagaggcaggcagatctctgtgagttagagggtagcctggtctacaaagaaaccctgtctcgaaaaaccaaaaaacaaaaaaaatcagccaacttttattgtatatttttcttagtggttaaaacacttgctactcatgtagaagatgaggtttgatacccagcatccacattcagcagctcccaatggcctgtaacttcagttcagtggcctcagatgttgccttctggcctgcttctgtaggcacttccaaatgaatgattcatgtaaatgcactgaggcacacatacagacacaaaaagaaaagtatatccttctaaaaattggaaaagtgtaatatgctatcctatgatagagtatggtttatattttagcactctctaaatgaagtagcagtgtcctgaataagtgaaatatgtaattcacagtgttttttgcctacaatgctacagtgcataagtattttaaatcattctcttgtttggtccttgccagtgcatttagcttcgttttatcaagtgttcctaattcatttaacaaattaagcaaagggcagatgtcaaaagtgaaattaacaattatgtggcagatctgaagcacacagtcacacatgtcttcaaatttaatgattcctataatacaaaaaagcaaccacaataaactgtgataacatagagaaacaaaaaggaaacatgtttgaaactacagcaatggacattttgtatgggttatttactttaaattccatagctaatcacatgctgatgaaaacctttgaaggagaaaacttatctcaattatggaatgtgaatcacaaaatgttgattttcacaaggtcataaaaagagtcactttgaatatttggcataggattttcaaattcagagcaatcatgtgcaatagtagactgtgttacaagtgtattaattactaaagaatgagtatataaaatttgaagtctattcaataggtgtaggaaggtacaaagttgtcttttctgagccctgtcaaatacccaatttttacagcttaagaaataataatttataaaaggatatgaactattctaaagaaacagcatcaggaacagatgatttgcttacagaggggtatagattagttctactttccttcttagaagttaccaatacataatccccaaccttccaaccacttacatctactattttgtcctatagagttagaaatatagaacaaaaagaaaagaaaaagctaatgtatcctctgatatgggatattgctgctttgaacattttaagacagaatttatgtggaaccagattaattttaaggaactccctgtgggttctgtttgttgttttgaattgctttaatagtaaacttgcattatttatgtttattaatatttagaatgcactctgcaaggatgattttcatctgagttataattagtctcagatgatgaatgcaataaaatgattataaacaactttgtgagatcattatcagcgtcctgggagaaaatgttacaacactgtttcagcatttcaccttcaaagatctatgaaatgagattcaacccacttcaatttttacatgggtcacataaaatttatgtgcttcttcatgaatttattgaagttctcattcagattcttctaaaatgaatttcatagttctcatatataaatagttgggcattttgatattcatctcttaattgaaagatggcttctttgtgaagtattaaccaattcagatatataaaaattatacaaacattattgataaacttatgaatacagaaagtaacgttggcattggagcacagtctttgattagaataatatatgtttgtatcacttttgttgagtatgtgctttacataactgagttaaatagcttatatactaccatattagttattttcattaggcattatgcaatgaaagttttctaataaattcttttaaattttctaatgaaataatatgtatgtgcaatagcacaataaaatacttgatgtgctacattacatgtaattttttaaatcactgtgtaaaaaatcaatgttaaagtataaatataagaaagaagaaaataaaaatacctaattgttgaagggaaaagatcctggaggcctaagctccccatttcagcagcaataacaactgaacacatgcttgtctgaccttgccttggtcactaagaggtcagatgcctgccttgtggcaaggaaccaatcagaagttagctggtggtgctatgctttatggctctgggtgtggtttatggacaagtgcacagcaatgccatatagagcatagcaaccaccctgggagggccctatgggccataacaaccagttggccaatcaacacagggcaagccctccaagcctggagacacaccaatcctgagcctgtgcatacctctagatactccccttacgctgccctataagatctctatgcagctgcttcgagctgtcttttgtagccgtccgccatggtggatggatgaaagacccgagctaacatggggttagctcattaaactataataaagccttgtgcaatttgcatcaatcttctgcctccgaatggtgattggggtggccatggtcctgggaaaagatcctggaggcctaagcttctgggggtcttatattgtaattcagttacaatttttaattgaactgcttaacctccatctgtacatatttcttaaatttttatctttttcttttgttactctttctttcctcctccatctccctagaccctgtcagcagatctctcaaccatctctcctcccatcaacctctcctcagataccccctcacctcctgtcctcactcatcacatagacttagccctcagccctggtgcaggcctattcaaatgcttaggtctgtagagatgcaaaactaggggacattcttcactgaggctatgccattcaacagtaaatcagctagcatctacaatacaatgcagacctgagctcaggaggtttagaccccgagaaatcctcttatggaatttttctaggctcctgacagccatccccacacagcatttttaaaacactcctggtcagaaaaatattacagataaacaataaagacagattctgacaaaaagaaacctctaagcaggtcacagtgtgttttaaaacaatgtatgtaattttaagagagagagagaaaaagaagaaaatgggtataagcacttacagaaaaaattacatagtttaaaaaactaaaacaaagtctttaagaagacagcaaaagtatattttaaaaagtcatgtaaagattgaaaatacacatagagtctggattatgtatactattgtgttttctttgaatatttggactggtaatgagctaactacagagagacatctgattgtgggggatgctaaagatatcttgacttcagaattgggcctaaggatatgtttctttggaaaagaggctctgctctttccacagaagatgagaagctttggattccttccaggctaatatggtttgatcaagtaagatccccaagaggtcaacaatgggagcaatggcccaggtgatccaacatcaaaaacagcttcaaagcaactggctgagacaatacatcctcacacactattacaaccaatatttaaccataattctaaattttctctggattactataagattaccagtatccccaatcaacagaaagtagtatattgtttacaaatgtttgttttcatttaaagcaggttgaatataaatgattaatagtcatagttaacctatttctaaagaataaagggagatacgatatagaaatgaatatttcaccttggtattgaagggaccaactccctgttttggcagccataacagcttaatacatgcttgcctgacctttccttggacaaggaggtcagatgcctgccttgtggcaaggaaccaatcagaagttagctggtggtgctatgctttatggctctgggtgtggtttatggacaagtgcacagcaatgccatatagagcatagcaaccaccctgggagggccctatgggccataacaaccagttggccaatcaacacagggcaagtcctccaagcctggatgcacaccaatcctgagcctgtgcatacccctagacactccccttacgctgccctataagatctgtatcccatggcttctcagcatctttccacagccatccacaatggtggatggatgaaaggcccaaactaacaactgcaataaatcctcgtgctgtttgcatcaagttttcacctctgcctggtgattggggtcaacatagtccttggctgagatcctgggggcctgagcttctgggggtttttcagtatgaattttggtttattgatacaaatttaaggtcgattttgttatactgtatgtatatttttactcttgtttaaggtattatgtttatacagctcatttaaaatgtaatgtatagttaagaatacaaattgatagccatctataatagttaaacttataatgaggttagttaggttttctagatatgtagagatatatttcaggtggatggataatcctcaaatacttcaaagacctacagaatatgtcatttaaaatgttttaagaacttagacttttctccacagtgagacacatctgctactggcagcaccaattactttaagatgttggacatggaagaagctctttatagagtttgctttcaaagtggcaaggttagccatttggacaagaaatttctcctgcctgggttgcttgactgtatgttatataaactggacatgcagaacccatagaaaagtgactactaaacacgtcaaaacaagatgggacagttctttagggttctagtttcacaaaagaaactgccaggcattctacaggacacaatggaaagtgactgtcaaactgccaatataggtgggacagcttcaaatttcctgtttccctaagaagtctgctggacactctaggcctataagctgaagatggatgcccaaacattacaaaagaactttgagaaactgtctaggcagccagatatctttgccatttctagagttttggaagttgcttacaatgtacttatcatttacttaggtaatattatagctttctggagtctttgatggagttaaaaactagatagttataattatagatttccttggttataataaaagataaagtagatataaaacattagactcacaaagataggatagatgatagagtattttctttaaatttgccaaatacagactaaatattataactgttatcattgcttgatacttgttttgttatatgtaattttacaatgttaaaattaaaacctttctttttcactagacagaaaagaggacatgatgtgggatgactctctgtatgctgtaaatatgttttattaccattggttaataaagaagctgatttggcaaatggccagctagaatcgaacaaggcaggaaatgcaaacagacatacagagcaaaatgaggtagagtcagggagatggcaggtagtagtcactacaggagtaagataccagagcattgcagtaagccacggccacatggtgatacacaattaatagaaataggttaacttaattgagaaagctagtcaataatgtgcctgaaccattggccaaacatttatatttaatattaagcctcagagtaattattttataagcagtcatgggaccaggcaggatgcctaaaagcttccagctacatcatttttactgttgttgctattttcttctttatgtccaattttaacacattctccttaagtttttcatcattactcaaatcttcccatacttaggcaatgggaaagttctcagtttttctttttatacttctgcctgaatgaaattcacccagcacaaggtagtgtaagtgtgcaaaggaaccttccttcagtgtctaacacttaggtggcatatgcatttgtgttgtcttaatttacatgtctaggagagaatttttcattttaagttaatggcatagttgattcttattctcccttttcaccactgacattctatatatattaatattatgtcatcaattccactactagaatttcccccaattttgtctatataccatcctgttttgttattgtaattcataaatgatctcaaaccaaattattattagcttttcagccatattaaaaatatctgggttttcatgttatctatttataatctatgtgtcacataaccctaataatcaccatccacttgcttcttgttatatttagggtagttgtagtttttctttatatcttaactgatatgattagcacctgctaatctcttccggccctccaccagtcccattgccttatgcattgatgttggagtgttatcactttgtaacatctcctaacaaggttcttatcaactatctgacattattcagattatcagtcatgattatatttactgatgctgtatcctattgcttttgctctccaatagcctgtttcatgctgctcatagacagtatcagtaacagaaaactgttaggatatctttttttttcttttatacttctcatgttaaaatataataataatcaaattagaggtttcttcaaataaatcccttttctatcactttaataggaatcaagaacaaatggcttaaacacctcaacatcaaacctgaaactgctgaaagacagagatatatagtcatggataaggacttttgaaaaaaggctctttgtttgagaaataaggccaataattgatcgatgggaccgataaaagatcttgctcagcttaggctgcagagagtgtcagttgggtaaatgggtggcccacacaatgggagaatcaattatagctggttatcagacagaaaattaatatctaaaacacacaaaaagcaaagcatcaagaaaataaacagtctgggtctgggtatctgactcagtgataagattacccatttttcttggagaggacaaaggatcgtttccacccctacgtgatagcctacaacaatctgtcacttcaggtccagaggattcaactctctgtctcctagtctttgaaggcacagcatgcatgtcttgcacttagattcaagagaacactcatacacatacaatgaaagtaaatttaattttaaaaatgaaataacataataaaaatgggctatgtattcaaacagaaaattctcattgggaaaaataagaatagtaaacattttagaaagtattcaagttccttagatcaagcaaccagaaaaacacaaatgaaaacaaatatcagaattgctaccataagaaatccattgacattaaatgctggtgaaaatgtggggaaaggggaattccaatctatcatcaatgggcatgtaaagtggaatatctattatggaacttaatgtaggccttctttaagaatctagaaagagaactacaaaatggcacatcattaccacttctgagtatgtgcccaaagtgttgaatattctacttcagaaatccttgctgctcgaggtttattctgttcaattcacattatcaaggaattgagaaagacttagatatccatcaactgatgaatgtgaaatgaatgaaaatgtggtacatatatacaaattttttctatcaattaaaatatatcataaaaggatattaaagagagataacctgtgagctgaataatgctgctcctagaatccatggtttattaaacaaaaacccaagttccaggtatgggatattttcttacatgtcaagggtcagaagagacccagaacacacctacccctaccacacaggctccttccattgtttcttatcatcactaaatatgaatgttctttagtgaagacatcataaaatttgattctgagttaaaaacaaagcaaactgaagttgaaatagtaggtccattgctactactttactcacgctgctagggaagacacacatcactctgtctgtgagttattcaaactgaaaaacaaaccagccagacaaggtgtgatcactagtacaatagtggcatgtctgttctgaggatcaccaactgctttctatgagatctgaggcctcaaaaggaagaaatgtatgtttggtctgtaaacatcatcggaaacctatagttttagaggtaaattcattactgttgtttggctaatatatttctgtttatgctcataaaacaaggctactctgaggcttagtcagaggtgtttctctctccagtggtggtgaataaagacacacagattcttaagatggttataataggaagcagttgaatgtccagccctctcctccaataaggatatttataccaccacataaaatttgtagaaaacatttttaaagaggggatggaaagaatgtatgaaatgtatagtaagaagttttccagaaatacaatattctatacatcatacaacaatagcaatcagagacccacagtggctgcaattgcatacacaaggtctgagcaagaatggggatgctaacagttattaattggggtagagctcaaagggcattaaattttctggtgaactttggctactgatgaattcagagaaagtaaaagtcattgacttcttttgcactcactgatgagcccaccagactccattgaataagtccaaacccatgcatacacagatgccatggttaagttctataggctacaaagcaaagtaaaacgacatgaacatgcaaagaaggacttgtggggaagagtcagggatggagataagaaagagtgagagatgagagtagttaaagcaacatacaatatccttagtatagactaaaacctcagcaatatacaatgccatttcatatcagttgaggctgttgtatttaaaacagcagcaattcatttctgtacttttcatttggtaaacataatacttgcacactttagattctaaacttacattttattatttatttttgcctttatcattttcctttaggtatctattttaatcagcatgtaattaaattttgttgtgcaaaacaattggcaaaagcatctgggttttgaagataattttaaacccattaccttcattaccctaattgatgacttatatcagattttttcatgcttatatttttaattatttgctaaataagtttttgctatattatcttagtaataaaatatattcgttttctttaacttccaagtgtttctacctgtttattcactatattccacatgaaattacctttacatctataaagtcatatatgaattacatatattcactgatggaaaagaaaaagatttcaggtgattctgttagcttcaactaatctggagtaacaataattctgtaatgcatacaaaacataaaaagttgaaaactgtgacttatattatattacacataggaaaatagtttaagtgtggtgtttttatatatgttaagtattaacttaacagtttaaatctatcattggagatgagattttgggtatgcttctttgtaaaccacataattgtattaaaagcacaaagtaaagagaaaatagtaaggtttatccttgtaaaaaaaaaactctttacaaattacacttacaatatcttcaaagagagcaagaatacaaaaatctacaaagaattcagagtaattcaaaaaattatgtcttcagtatcctaattatattaaatataaattaatttagctttctcacaaaatgaagtgttaaattagttgaataaaggaaaaataagagatttagctatatgttgaaaacaagacatgcagattttaaaacacacataaaaagactgaaaaaagtatagtatgtttatgtaaatgaaaaccaagaataatgtacaggtggatatatgtacatgagaaaaataggcttcaagtgataatttaccagaagcaaataatttaattatgaatgccatcaatcaacttatgtgaggaaataagaattgaaagtatatgtgacccacactgatgcatctaattacaaatgaagaaattacaaatagaatcaaagtcagaataattaataaaatactgtaagaggatttaagtatttcaatggattgaggagccctacagaaattcaataaattgcaaatgtacactgagcatgcgatgtaaaagtagcacaacattgttttcaagtttcatgaaactcatttcaaaatacatcatacaacaaaccaaaaaaaaaaaagagtctaaacaagtgagaagactgaagcaatgtcaagtatcctttcccacctggtgggaattagataatgaatctaattatcattaccagaaagaaaactaaaaaattaaatgcaaagacatcattaaaggcaactgaacatctacatgaaaaggaataaaataaattctaattaatgtgtgaactcctagaaagacacaacctgttataactggatctggagaaacagaaaacctacatagatgagttccaagtaaggagatcaatttccctccagacaaaaagccctatattcttctaatgggtaacacttagcatttaatggagaattagctttaatctatcttacaatcttccaaactgaggaagatgcattttcacaaattaattgtttggggtcaggaatagtagaatgaaacacccacataaggaaccacaggtattaaattacaggccagtgatccaagtgaaaatagattttaaacatctcaagacaaaagtcaggaatttgaaagtgagtaagaaagggtgtatggttcagccaaatgatatgtaattcagaacactcatgtgacatcaaaaaaatcaaaatgggagaagtccatcatatcagatctattattttttagaaaaatgttattttacatgtcaatctcgccattccctggccctctcaacctcccatgccccctccaccccccaacaaccccccccactccccaaggatactgaggccttccacaggggatcatcaaagtctgggccatcatttgggagagggcctagactctctttcatgtatctgggctgcaatagcattcttacatagtgaatgggctcccaaagtccatttgtgcactagagataaaacactggctccacattcagagggcttggtttgatccaatgctggttccccagctttacaaccagggtctctgtgctctcacttcgtcaggtcaaatgtttctctgggtttctctagcacacagtcttgactcctttgctcatccctcctccttctctacaactggattctaggagattggctcactgttcagctgtggatgcctgattctgcttcaatcagcaactggatgaaggctctagaatggcaaccaaggtagtcgtcaatctcattatagggaaagggaatcaaagtcagcctctccactactgcgtagattcttagttagggtcatgcatgtagatccctgaacatgtgttcttcatacatcattttatgtggttcatggtatcttcagatatatatgtcatcagtagtgatgctgacctttataactttattaagaatatatatggtaacgcagggcgttggtggcacatgcctttaatcccagaactctggaggcagaggaggcggatctctgtgagtacgaggccagcctggtctccagagtgagtgccaggataggctccaaagctacacagacaaaccctgtctcgaaaaaaaccaaaaaaaaaaaaaaaaagaatgtatatggtagcctttttctacagtaaaattactgaatttcttttataattttaaaagcatttatagatatgccatattataatgaaaatcttcatcaaattcataccatctgattttatatacctcagtaaaatttcattgcaataattattactgcagattttattattgtaatttttaacttttctttattcatctgaatttattcattagaattccactgcaatacatttaatttcttcatatccttttcttatttaatgtacacctttcctaccatggacttgcagatatttgttgtaattttggagttgcaatctaatctagcttttatttacttgctcaaattgcactttgtcaatgggtattaaattccatcattttacatcaccattaagaatgttctcattctttctggcacatatgcctaacttctcatgcaataaatattctaggctagtattcaaacaaaaaacaaaaacgcatatatgggagagtgtagagggaggaaggcaaaggggaaaataatataattgtattgtaatctcaaaaaataaaagaacaaattaaaatatttctaaaacttctcaaaatgttaggaactttagttcaaaagcaataaaataggtttaatttattgtcaatgagttatcctgatggtgcaggaaatagcttctattcaaatcagtaagtatactatcattaagaaagcaataataaaaataatattttgctttttgtagatgtatttttcatataatcaatatatgttaaaataaaacctcaacaagttagatttagaatacgtaatccataatatatttttagaaggataaaaaagacaaaactacactaaaaagtgaaaagctggatagtgaaagccagtgacaaaaaacaggatgatggctctcttcatcactaatcaaagggatccagaagccccatgctgaagaaaggaaaaagaaagttgatccatacatgttggaaacaaaaacataaaagtgaccatctagagatgacgtgaccatatatgttatatattaatcacatattgtagatgatggatagacagacagacaaacagatagacagacagagaagttcacttagttttatgtatggaaagccacacacagatatacggagagagtaagattttcaaagatttaaaggtaaaatcttccatttacaaggagacagttctaaaggatgttatactaagtgaaagaagccatgcagaaaaggacaatattgcttgatcttgtctgtggaattctaacacctcactcataaaagtcagagactggggcttttataattgtcagggcctaggctttgcttgggtaatgagagatgcttgccaaagactacaagatttcaactatgaaggattagagagttctagagatctaatgttgttgagcatgatgactacaattagcaatactctcctggaaattttctgagattgaattaccattaacgtgaggttttcttggctcagctagatcccactgcccttctctgccccaaataaacatgcagatactattaattatgaaactgttgaccattggctatggtttcttattggctagccctgtcttaattataaatccatttctataaatgtatttccacggggttactggagaaaggtccagggacctctttctcctctggcgtcctacatcttgattgttcagcatctcagcagtgaagagaaaagaatgatttcctgcttgtctctgcttatattctgattcttcccagctatattacttcctgcctggccaatcagccaatcagtgtttttttcattaaccaataagagaagcatataaacagtaaggacttcccttgtcaaattataaatattttcaccacaaaaaaagaaataactctaagaggtgacttatattaattatagtgcagcatatttgtacatgtatttattgaataatcacatctcaattttattttcaaaatgtattattattattattattattattattaattgttatcattattggtctgtgtagaagggcctgcatgccatagtgcatgtttgaaagtccagaacaattttgtgaacctggttttcatccagggatcagactcaggtcactgtacagtaatcacttcattcacttagctatcttgttggcgctaagaaatcacattttaaatatgaaatatatatataaaacttttgtctattatatctcagtaaaactataaaactaactaggttaaaattagaattagtgtggttggtatggttaagaaactggaagttatcagatatttttctgagaggaagaacataaagatttttaaatgatatcaatatttaccatgaaatataaacacatacctcaaattccatgttttcatttgaaataatagtctttgctatgtttattacttcatttgcatatgcttactataattaaggtatttggtgttaggaaatggtctagcttcccatctattatttgctttttttccctgcagtatttctgagtgtaatgtgtgtattatctttgtggtgacaacataacagacctcatctttcaatttcatagtgtattatataagtctgtttatttgtgtagcatgttatgttgacctttcaaatgaggtctatgctattacactgttaaacagattaacattttagacactgaaattgcttcctacttatgtatcttaaaattgaaatattttattagctatttttgattgggttaaataaaagcattttgcttgcaaaaatgctaacccagtatgtaaagattatctggaatcaactcatttctggtagagatatctacttgtctagaacctcacattgaaaatccgcaatgattttgtttaggtttagagtacaacattgtacatttagcaattcaacatttttttttgctgatgaatttagatttcatgtgacttggaagctcaagaaagaggaggggatgtgtggtttagctggaatacaaagtttagtagaagctcaaacaacacacatggagactaactgtccgcacaaaatggaaaccaaacatcattctttccaagtattatttaagtacagcctgtgctcaactcatagcaaatttatttaaaaccaacaaaacaattgtgtctcatgggattaaagaacaagttaaaaatttttcataagtactcttataatataaatgatattacagctattttgcagcaagtccattcaggtataaatccaccaagatttacacagtgagagttatgtgaattagttgattaatcagttttacttattttccaaatgacttattgtttttagcatcttggtttctaataagcttcatgataatacttcattctgtgagtgaatgatgtatgtgtggagagaggagtatctcacagatccagtcacagtgtgtcagcaggaatgaacctggaatctcaatgagtcagcacagaagtgacacaatcaatatatcctgtacttttatttgttcccaccatcacttcctggcacgtgtttttaaatgaagtgttctaagaaatgcatcaatatgaaatgttgtctttgtgtaaagaccagtttacttacacaattaaacatagataggtcaatcactctgtgaactactgctacaaatgctgcaaataagagatgtggtgtacaaaaggttaatgaggatgccatgaatgtaacaatgccaattgttaaactatcatcctttttattcttcagctgggaggatactgccaaataaaaagttgagtgtggtggctcacacctataaattcagcatacagtaggctgaggcaggatggattaacacaaatttcaggccatcctgaactacatagtgagttggaggcaagactggcttccatatgagaccctacctcaaagcaatcaagataaatacataaataaagaatgtagtgcatgtacaaatcagcactagccattctcttattatcagtgttctatagtctgtgtaatatatgatctgtcattgtgcaagacagcagtgagtccacatatatctctgtcagaaaattcacatgtgtaaaatttgtactacagcttatgatagccttgtcattattaagtagacactttcactccactctaaactcaaagccattgtcatgtaacacattcatcattgacccaaatattattataaaatccatgactatacttgcaaaatattaggaaatacatttaaatataattgcaagtctattacatagggaatacttatatctaaaaagcctaaatagcaagatgtttttctttctccaaatagctatacacttcaaaatgtgatttcaattttaatacatatacatacaatttcatgtctaactatgagcctaaattaatcttttactctgaattcttacaaatctcacttattgttttccattatgttatcattccctattcattacattgtattactagtgatcctaaatctctttttgttcaatataagtttaagagttattagggcagaccttttgttcctttcaaaatattcctctatctctctgtgcattacactcaagcacagaatatggtgcttgaatggttattgcacaggaatagccaatgtgcccagcaatatgcataaaagatttatatgaatatcagtataagtatgaaatatttcattgatttttttcacaagtgacatttaaacattgactttatgactgtaaatattctctctccaggttagagagatagcacagaggttgaagagcacttgttcttactgagaaccatgggtcaacctctagcatccaaatgttagctcatcatcctctataacttcacttccaagagatctgacatattttatgacctctaagggcacaagactcacacattgctcagatgtgcatgcaagaaaataataataataataatacacatgaaataaaaaatctaaaatccaacctgtttacctggaagctgtttgtattaaaagcataaatatatacaaactcctcctatgtagatagacatgcaaatatgtatacatatccacttaatttagttgtttcatttgttcatttatgtcaagatttgcaaccacagagacacatttggacttgattttaaattcaagtagtacatgaatttaacagacattcattgtgcttttaacttatatttgccttgaaatacaggtatgacacattactttatattgactcaaaagtctcagtgaactacctttcagatatgtacattgggattgaaaaattagcagtcttgttcctgggaagttatctctgaataaattgctacttagctttctctccttacagatatacatcatgggcacttcgaatgacaaaatgttatcattaataatttcaggatctaatattctatctgacatacatacccccagccttttaattaaggtcttggcagaggagataagctgtagactgtcttgagacaggttgtattactaaatagactttattatcctgtagccaccctgcaatttaattgctaagatatgctatagtcaatcattatacaattggctaaaatatgcttatctcacatatcaagaagccctttacctgattttcatgactatccataaagcagactaaattcctaggtgaatttatgaagtgttatctggaaacaagaaccctggtaataaactacattccccatcttactgctggattataagactgcccaataggatgtaagaacaatattgtatatctgttattttgtaaaatattcataaacatacaggtaagaaaaatgatttgttcttttaccatttcttccatctttttgctgtctgaataggatcaatatagataaaccttatggcaagagtcacctgttaagaatgaatagatcccagaaaagaaggaagtgagacttctacattattcagaaacagtttatttgtcagtatggcattggaatgtctcaccatgagctagatcctaagttaagatgtcgtaggcagaactccattattctttgattttactttattttcccactttgctatatttgctagtatcaaagaaattatcctagttctgaagggatcatctagaaaataattttcaaagtaattagggctgatgactcttttctgttacaaagtctgttttgttttaatcttaaagaagaatggaatatacatctttatcttatttatatcttgcatataagcataatgagcatgtatatttatagttccttttctcttttcctttagttgacaattgaaaatcatattgagactatgggattacagaccaccaatgttaacaatttctaatcaaataatgtttcttgcagacagatctgataataaagccatcttgaaggaatgatttcataattattgaagacagttttatttccctaaggtttagggagcaactcagaagatactatttaacccttcccctcactcttccacatacccaagaattctgtcatcagtcattttttcttactgaaaatggtttctgttgaggctggtgatatggctcagtaggtaacagcactttcaaacaagcctgacaacctgagttggagttacaggatgcacatggaaggagaagataactgactcccacaagttttctttaagctcatgtgcacacggtgatgcttgcatgcccacttgtacacacacacacacacacacacacacacacacacacacacacacacaatcaagcaatgtaatcagatatttccaaaagaatttactttgtgagggctagccaatttgaaaatgaactcaccttctaaatatgtttgtagctctcatccaaataataataaggaaatatatcccaagtgtattatgaattgtccctgcaaatatgggaaatgattgccacataaattttggaatcatatttgaatagtaataaatagatgagtttagtgaaatgtaactatttttagcaagttgtttctcacaatgggaaaagccagtatcttgaagataatttctcttatctgttatcttaagaacaaattgtttgttttaaaaggagataaaatacacataatacataaaaacacacacagtatcctgtgttgttgaattaaaaacccaatgatctcagcaaagtaagacagtttacaagcagttaaaccagaggcctcccaaggacagggcctcccaagctctggactctgttgaatggaatgttcttggctgacttgagagaggttattgtccactttcttcctgctttttcttctttgggataatctactcaaatccacacacctcatttacaatggataagcaggttgcctggattgttttatctggattttatatatattcatgaaatggtcaatgggaagactgccataagaatagtgcagtattcactcgaaaatataattagaattggaattcatgcaactgcaactgtaaagtgccttatatcgatgtggaaagcataagaataaggtttacatgacacaggactttttagatattatacataggttgtacaccaaaatttaagatttcaactgagtccttctatcagctctcccttgtttttaagaaatgataaagtttagataaacttccttgattataaagatattttgtttgaaataataatatttttgaaatgaagccaatatgaactaatgacacaaaatgtctaaggggatgcttttgcctctcctcgggagagagacagagagaaaaggagggaggggatggaaaacagaacattgtgtgctctagcattgtgtgtttatcatctttgtatcatgtcactgcaatgtgtgtcttaataagagtttatgggggtagctttccaaacttctttctctgacttactctgtcatatttttatattggaaacttgttgaaatttaacagtatagtttgtgtgtatgtgtttagactgtgatttgtttataagtttttacccattgaagcttcgaagatagtcattgattataatttcctccttattcaggctgctaagtgctggcattgtttggtgccaactgtaaaacttttacagcttgaggcttcaaatcaatctttcagaacattttaattttaatcctatgaactattgattttacaggctgctaagctgttgattctgattccatttaaacatacaaaagtgaataataaagatttaataaaagctaaatttggattcaaaggagagatcttggtacctacaaatattaaaaatagtataaacctcaaaaccccaatgttcggtaaagtcccatgcagaagctccatgtgagagcccacagacctctacgggtcacccatctagctatcagccaccctaccaactctgaatccatacaacatattgtaacatggaattgaggtagggatcccaaacccagtccagctatccatcaatcacctaacttaatagcttataatgaaaactcagtagtgtatttcacccttaacacaagataagaacacctaattggcctcacccactgacctgtacctgaggaaatacagcatcctatgacatttctgcaccagtcacaagctgtaaccacagacactgtcatgcaaggacttcctgtaaattcagagagcctgacttgaattttgggagactgaaagtgagactttctaagcctcaataaagttaatgtatctctttccttgctctccttctctgtcctttccccaattctacattcccaacccctaatgttctccccaccgcctccccttatcccctacccactctcctactacccttccccatacccccatgctcccaatttactcaggagatcttgtctatttccctttcatggggtgggaggtccatgtatatctctcttagggtcctccttgtttcccggttttaggtctatcattcacttatgagtgaatacatactgtgtttatctttcattctttaatagagggagctattactcagttaatgagaaacctagcattagggaaatattcagagatccacaaggatgaccccaactaaaaatctaagcaatagtgaagaggctaccttaaatggccttccctataatgagattgatgactaccttaaatgccatctattggattaaggtctctttatttccaagcacaaccgggtgaaacacaggccagagctaggttaagaacccagccagcgcggccagaacaaagagagagcgcagtccccacgtgcagtcctttaagaagccccctttacgtcatgccggctttctttcaccccgcccttatgggcgagtccccaggtccacctggtacctgccccaggactattgggcggggctagggttactccctacaattccccttttagtctaagagaggattaaaacttaatagtgtaaaatatccaaaactaacaatcataagggtggaatacaagaatatacaataatctgctatgatacatcctatgtctattctagctaagtcttaaagtcatgtggaaaaagtgtctaacttgaacaccttccaatcccaactctaaacaataagaaggttattcttaactaggcttacactaccctaatacacaataatggggaacgggggcgtagcatcttctaggttacttcctgctgaaaagggacgaagatggtcatgtgggggccctgtggaaaaaaatgtcagtatagggaaagtctctaatgagttatgtctagtccatgttagatgatttgtttgattgaagatctacgttgaaatcctcaacttgattgaagtcgttactcgaggttctggttggagtgtcagtcgaaacggagtgagttgaatccagtgtagtcaggaaggtgtagtccaattccttttccggagcatgtagggattgctgtcaggctgggtcttgatggctgtatgggactcaaacataagtgtcatcagagaaatgtttacttgtttatgtatgtgtaccgggaaaggtaccttgatgaaccttgactaacaacgattctgagagggtgtaaaagaaaagccaagaaaaacaaagatagtcctcttattctttatttattctgtattatagcaattggcttcttgatataacacagaaacttttaaatgttgttaaataacatgcttggattttagagtaggaaagccaaacccaactctaaatccagcctcgatttagttgaatagggactaggaaatgaatagacatagagttattcgagagacagctgtaaatttttaccgtatagcacgttccttttgttcgatggttatagctacgttctttccttgagtatccatacatgtaatgtcctttgacttatagagggcagttcctcagaaaatacctgtcagtcatccttgtcgagggggttgtctccctcaactcgaatcttgatcaattttgatggtatccaaagattttcttctcctgtggagacaaatgcaaaacccctaccccaacgtaacacatgtccaggtttccataccgaggtcagcacatatttgtaatacactggttggtttagttcagctgttttttccgtagtccagtgtctttccgcagctgtctgcccactgtcattggcattaagaaagtttagcgttaataaggcattatgtaatctatgtttggggggttttgacttaccagcttgcctatggagcatctccttaagtgtcctgttagacctttcgacgactgcttgtcctgtagggttgtgtggtatacctgtgacatgcttaatgttataatatttgaaaaactgttccatttttgtggagacatatgctggagcattgtcagtttttatctgtgccggtatgcccataactgccatcacctctagtaggtgtgtaataacggaatcagccttttcagagttgagagcagtagcccattggaaacctgagaatgtgtcaatggtatgatgcacatatttcaaatttccaaattctgtaaagtgaaaaacatccatttgccagatctcattcctccgaaggcctttaggattacatcctgctggcattggagtttggttataaaaggaacaagtaggacagttttggattaaggtctctttatttccaagcacaaccgggtgaaacacaggccagagctaggttaagaacccagccagcgcggccagaacaaagagagagcgcggtccccacgtgcagtcctttaagaagccccctttacgtcatgccggctttccttcaccccgcccttatgggcgagtccccaggtccacctggtacctgccccaggactattgggcagggctagggttactccctacagccatcctatggactttatccagtatttgatagaagcagaagcagagattcatggcaaagcactgaatcaaactcctggagtaaatttgtagagagggaggaaaaataatataagtaaaggagtttaattttaaacattttaaagaactatagaaatataatttgaatcataatcccaaagaccagtcataactataatgaagaaaacactgaattataattttattcagattagtattccttgatttcagcatttttgctttgcagccttattgggtgatcatgagctctgactataaaatatattgccaccattaaaaatctcaaatattatgagatctcattcgttttttagtagttatatgtaatgatttatgaaaacgcaaaggccaaaaagagcataatataaatggactgagaggttatagttatacatttagaaatatacacacatgcctgtgcatttagatacaaatacgcgcgcgcacgcgcgcgcgcgcacacacacacacacacacacacacacacacacacacacacacacacacacacacgcatacacaggcaacaaaaaccaaagaagaagctgtgaatttcagaaagaacaagggagtttctggaaggataggaatgatgaaaggaaagggggagatgttttaattatattttaatttcaaaatttaaaaatataccctaaaaagttgcatcttagaaacagttattaaggtgtaagtagattttccagattgactatgcagttatgtttaggaatatatgtgtgcattgctgtaaggtaaatttgcatgactgagaagatgaattatacagaaaatatatagaaaatttcattataaattcccattttttccataaagaccttatacttagaaagatttcatttggagcttttaagtatgcagtgaatacttatgtaatatttatttaaagagaaattatggtttgatctactatcattgaaatacttctaaattttctttattgtttgcacaaaagtcaattccaagataatattagttcttaagaaacaggttttaccgtggcaacttcacacatacatatcactatttatgcatttcattcttcccctccctaccacctttgcctgtgtcactatgtgcttctgactccttttctttcacaagttctgagcactttctgcttccctttaacatatgtcccctttgctccacttccctcccctctttaaaatctcttcatgccctctactaatcttatgagagaagccgggcaccatttttctttttgaatctggcttatttcactgaaagcccagaatgatttctacttttatcacttttgagaatattccatggtgtgtgtgtgtgtgtgtgtgtgtgtgtgtgtgtgtgtgtgtgtgtgtgtgtgtgttaggactgcataaaattccattgaataagtatatcatattatctttattaatttatgtcttatagaagactagtctcgttctacttcctggctattatgaacagtgtaactacatttatatttaagtatcactgtggtgtattgatttagtgtcctttggttatatatacaagcatggtatatagctgggttatggtacttttctagaatttattcatttcttctagattttccactatttttagaatacaaattctgaaagtactccctaatcgttctatatcttttacttattctacagttatcatcccattctcatatctgcttttttaaaacttgggacttttctctatttctttgggttaatttgaatatagattagatacacatgattttttaaatgatctaacatttgtttgattagttccaggttttttattttagtttcactttcattaatttctacttttacatttattctttgtcgtcaactgctttcagttagggttattcttgtttctctaggaccttaaggtaccttgttatgttacttatttcatatatttaatttttcatgtatagggatccataattacaaatgttcccgtaaagcaaatttagttttacctcaaaggttcaggtaagttgtgtttttcttttcatttcactacagtgaactttttgtttgttttcacacaaaactatgacttatttttaggcattttctatagctattactttatgcttagagctttaagccttgggctatttggccttgtaagcacacaatgaaataaacacaattagctgttgtttttcctttgccttggacacctgactctactgatattttaactaccatctgcagccctgttgccccacagtcatcccttcactactcatcctgtgctttgctggcactgtctgggttgatgccatcaaatgtagtttttaactaagactatcattctatctacaaataagcacttgagagtaggtgttggggtaaaaacctgaaagctcagaagggcagagaagcaaccagttgaccttccttttggccagagacctaccaaaagaatgtctctctattcttcaaaccaaaaagactgcaaatctctaaatccctccttacaccttcctatgcatctctctatccatcttcctggggcctctgtactctctatggttaattcttgtaaagcagtcagtagctccaccacaatccaagattgattttttttaacacattctcaggcttcctcagagcaatcaaataaacctcaatatctccccctttttaggctaaataagaaggaaagttttaactctaacacagtaaaattacatataataagaacaattatcaggtaagaattacattcacaatgtctagtccatttgtatttggcaaattcagagaaagtactgtattatctatcctatcttggtgagtccaaagttttatacttaaaccactttttctcaaaagttgctttaccaacataaaaatatctttttagatattaaaacattttcttaccttatgaaaggcatcaccctccctggggaatggatgggagatggggtggtgggggtaagtgggaggcatgggaagatgggaaaaagagggaactgggattgatatgtaaaataagattgtttctaatttaaataaaaattaaaaaagaaaacaatttaagcttttatctctcttaatgttataaactttacatctcttttgtaagattctttttctgaatttggtaacaaagaaaatggtgtataaatcagtaaatagagacccagagtctgatatcagggttcaagttgaaagctgaatatcagaaaagcaaagcagctggctgctagctccttacctctaccccaggctgaatgggctggtcctttctccatgatctctccaagcctcagactgtaacctttcctcatgtggctggagaatgaatgcctccctgagaccttgcttctgtcttatatgcttccctaatgttgggattagagttatgagctataattctcttttagactgattcactcttatgtagatctgggtggcctttgcctcacagagatttgtgtatttcttaatcctgagtcctagaataaaaggtgtgtaccaccttctagcttctggctgttgggattaaaggtatgtgcctggcttctaaggtttgtggcagactttgttttctgaatcctcaggcaagctttaatagatcataaataatatatcactacaaatatatagtctccaacctgcatcagagactggagaaagatataacattacctgagtaaacaggaagcatggggcaagaaacttccaaaactttagaaatgacagattcagctggttgcctgaaccagaaaacaagtctccttttcgatgttagaacatccatttttggcctacaggcctcaaatatctgacagacttttctgtgaagcaggaatttttgaaggattagcctaccttatcttggcaatgttcattggtaaatttcctttgtgttctccttatccaattcaggcagcataatgtcagcagtcaagacaagcacagatttttgttttctttctttttttgttttcttttctttttttctcccagtggtgctgccaggagcagacatatttcactctcatgaaaaccttatgatacttaaacattttaaatgcatgttctgtatatctcagaattgttttaagaccacctctctatctaatatatctctacttaactctgaaatcatacctaatatgactgcaagtttgattgttatagataaccaactactaacctacatttcttggctgtcccaaacagtttataatagctttcaaggactaggactttatatttcattttaaaatgtagattttaagataacatttaaaaaagttttaaagaatcaaaataaaaccaaatgattatgaaattgatggcaatagaatggtgctttaattttgcttttcttctatcccataccaggtggctcttctgacactagacagagattctggattttcctttaacaggcatgattgggtttaaagaaggagaaaaccacactacaacttacttatttttcctgatttataacctgcctttcctgatttatctgcatcaatatatattatagaggctgcagaaactgatgttccttttagtatatgacagagaatccaattagttcttattataaattgaaatctcttgcttttgggatatttgttgctagtttctcccaaaattactacaagcctcttgttaatgctcattttctgcccatattgaggcaattttagcattagtaaaaggtaccacaatttctgttgggtctattcctgctaagtgaagaagtctcaattttccttcagaatcaatcagaaaccttttatatacagatctttaattttttctgtgtggtaaattcaaagatgttatcttctctctgcagaaaaattcttatatagaaggtaatatgactaagatacaaacaagctatgagttcacgtgatcctcatgtgcattgtttaatttattttctactagattcaattctctctcagcctcagctgataattttctcagactatttatgtctttaaaaccttataaggtttgaaatgaattacttagttcttgagtggttaatctaattgtgggctgtagttacttaatacctcccagcaaattttgaaaatcattaatagtttgtaattgatctttcctgatttgtgctttctttggttgaatttcctgtaaacctatattaagtcataaataaacctatcttacttcctaaataattgacagaatctcctcattgtatgtttcaggagcaattagtaatcaccaccatggcaaaagattctttactttatcaaacatttttttctaaggtatctgcatatgaatcagccagcaaaatatcatccatatagtggtaagttatagaatgaggaaactgtttatgacttatttctaacagctattgtataaaacattgatacaaggcaaggctgtttaacattccttgtggaagaattttccaatggtaccttttaacaggctggggattattaaagtgggcactgtgaaagagttttttttttttttctatcctgttcttgtaaagatatagaaaacaaaagaagtcttttaaatcttcataatagaccatttttcagataataaagaagacaaggtaattccagaatttaaagggtccattggctaaattaccttatttatagctgtcatatctgttacctttctccatttttccagatttctttttaataacatagaagaatttcaaagattggctggctgattctttgatgtgtttaacatttacttttcctaggccagttgttccagttcctgtaatttttctgttgtcaaagcccattgtttcacccacatgtttgtaagttaaccatcctaaaggtaaggatattggtacctttgaaagaccaatggctgttgtgttttgtttatgtacaacccgaacagctcatgactgctgttgataataccttttaatgattttctaaggattctttattttagtgttgtttctgagattggaggaatattaatgtatattttccattgctgcagcaaatcatcccccataaattcagtgctttgtaagccacatataactttaattttcctatctatctctctggcactatacactcaacccactttgtactttcttttgtctgagataaagttccaatcctaagaagttgaatatttaactcccaaagaggtcaatctgaatgccaaaattttggtgtaattattgttacatgtgtccctgtgtctaccaaatcctcaggttcatacttctctgttccttccctaacataagggccatagaaatacaaattaggataccttacctatggttgtcccctggaaaaaaatcactattttaccaaaattttcaactggatttgagacttgtaagggctatgagataatccagactattgaactgtctacattcatttggcttttctcataggatgtagcttctgaacaacttccaatagtcagttaacagcatggctacagttgtgttgggcttaatcattaatgtcatgcatactattttatgcagttgtccagtatccctgtacctcctttattaatttttaaatcttttccttcagttatctcttcgaaataatattctgggttttttgtttttgttttttttattctgatgctccttttcagcctccagcctaccaccatctctgaaatttctaacactgattttcaataaaggattctgtcctctaaaactactatggaacccgggtgttggtgttgcatgcctttaaatccagggctgaggaaggacaggcaggtgtttctctgtgagttggaggtcagcctggtcaacagagatagttctacaatagctaggggtattacacagggaaaccctgtctcaaaatcaaaaacaaaaaacaaagcaaaacaaaaagactactctgcttttaattcttcagctagaaagagtttaagttttaattttatttattcatttgttttttaatctatgttcattgacatttctgaacattaagtgtactttattatgattccccagagtaattgtcacaaagatatcgcttgctaagccacctccccagccaagctactgccttttctaacagctttaagatcattctgagccttcctctgagaattgaattgagacttctcttggcaatcagtaggactattccctgtgtgtgaagaatttacctgccgtggcctgaaaatcagtcacagacagttgtgcttcattctcatgcattttgagaaaactcattaggatgtaaaaagtcagccacacagtcacattggaaccaaatgagttgtatgcctacttatacctcaggtgctaggaagcaaaaaggttttgagctgcatggcttgtagcctctcacatttcagggagagtattcactagcagcactgaacaacatgtgagtgtatcgagggcagaacagaattcacttcaaaaatgaaaacataacaaacatccacatggctgtctttttttccccagctatttgcaaattcacaatttgaagttgcatgtaactgaagtgaggatgtgccaggctccccacccacatgcccaaaaaccttttttgctcacactttcttgtttgcagagacatacttttatcccctgctttgaaagaactcagaggacatctgtcaaataaccccacagaagatttacaccagggtgttgaaaatactctaaaaaatctgttcaaaggccacaatatgtttaaattagcaacagtgactcacaatacattgccaccaatgtcccttagtgaggtttgatctgttatttttaatttgtctctctaagactgtatattatttaggagccagtactctatgaaaatgaatgtctatcacactaattgcttttgaaactgtaattcatccagagttttaataagaaagtgatcatttcaaataactacttatatattataatgtccacaaaataataatatttgttaaacagaccaattagcaaatgataaaaatttggtaacttatgtatgcatattatttaaagaagaaagtgatcacaagtttgaatgttgtctccaaataaagacaaaatcaagtcaccatatacatgtatgtttgtgcatacatttttcttgttatccagttgtgaaaccagaatgcagaaagagggatggcatgctgttcaagacctgaaaagaaagtacgtctctggaaccaagaatcaatagcattgcttaaggatatagctgctgtttacatatacattttgtatctaacaaaattatatagagaagttaaataagataacaaatattctataaactttattttagagagtcaactctcatgtagttaggtagtaatgagatgcatccagtataaccaaaaagttgtttgcctctttgcttgctggagctataatgagcccaacttgcattggaaaattaaaccatatagaagatttttttgttttgatattatgtgataaccatatactaagttatattttttccaagtggttctgttccatatagcacagcaaaattagaaagttttggagctggagagatggcccatggtttaagaatgttgctatataagcatgaagactgaattttagatgccagtacccagaaacaagatgaatactgtccatacacacatctactactctcattcgaattaaggcatgatggcttctatcctagctgtaaacaaatatgtatacaaacactgaaacaaaacacagagattctgtttcaggtagagaccctatctcaaaagaataagtaatagaggataatacacactactcctctcagcacttgacattcaggggtgtagttatctgcatacacacacacacatataggtcacatacacacatatatgccactcagtcacaaacacaatgagagaatttcaggcatcatacaaccaactcattcagaattcaagaagtaatagttagaaaaaaagaatcccagttcatgatttgaaagatgtatttctttgtaaaaaaaataattatttatagtatgatgttaaggtatctttttatacctttccttattgactaagtgaattatatctaacatgtatttccatgcatattatactagaattagtttttatgaaaatataaatatagaaaatattgtttttttcttttaaacacaccagacttgtttattccatagaattccttaggaaaattatcatttcagtcagagaagcatttaatctgcatgtacacaattcatgaatttaaaaaaaatactaaataaatgcatgtttttggagagttcagtaacagaaaaatgtactctcaattcaagtcacacacaaatagaaaattcattgatactaaaagaagatgataatttcaaggaattcattaaaacaatccattaaaatgttaggatgctggttaagactagggtcttctgctctcactatgtcaggtcaactgtttctgtgggtttctccagcatggtcttgactcattttctcatctctcctccctctctacatctggatcccaggagtatggctcagtgtttagctatgggtgcttgtttctgcttcaatcagctactggatgaaggctctaggatggcaaccaaagtagttatcaatctcattatagggaaagggcatcaaaggcatcctctcaactgctgcctagatcttagttggggccatccctgtggattcctgaacatttcactagtgccaaacctctcactaaacctttaccagctccctattggaccaaaccaagccctctgaatgtgggtgccagctaggagacctgggcaatctatgggacctctaacagtggagcaagtgtttatccctaatgcacaaatggacttttggagtccattccctatggaggggtactattacagcacagatatatgaaagagggcctaggccctcctccaaatattgtgacagactttgatgatccctggtggaaggcctcactattattggggagtatgtagcagttttttctggcccagctggttcactggccctatttgctcgtggctttctcttactggaggaaaggtccaagcctcttactccattgaggtctacatcatgttttctcaatatttccacagagaagagagtaatttccttcttgtcccttcttatattatgactctgcctgctaggtcacttcctgcctggatcacatggaaacttctctttactacatttcctagaattctccttgactcctagtcccacctatcttgcttccctattggccaatagtgttttattcatcaaccaatgagagaagcctatgtgcagaatatttccctcatcatctccttttttctgtctaaataaaaagaatggttttaactttaacacagcaaaatatataacaaggcagttattaagcaagaactatatatacaatatttagttcattaacatttagcaagattcaaagaaaacatcatttatcctatctttgtgagtctaaagtcttatatgtaacttatcttttatcctaactaaggaaaactataaccatgactatctgtcttcaactccaccaaagaccatagaaggataatataaactctagaattaacagagacatcttgctgcctagacagtcacccaaagttcctctgtaatgttggggcatccatcttcagcttacaggccacagtgtgtctgacagacttctcagcaatacaggaaattttaaactgtctacctgcattggcagtttgtcagtcatttttttgtccttcagcatgtctggcagactcttccatgaatcaggaactcctcaggactgtcttgttttgcaaattcagcagtcactttcttgtgtgtcctgcatgtccagtctatcaaacacttcaggcaaagtgttttcttgcccaaatacctagtctttccacattgaaagcaaactccaaaaccagtttctttgatgcccatcctcctttcttacataattggtgtgccaggagcaattgtgtttcactgtcatgaaaacccctaaaccattttaaatgccatattcttaaggtctttgaaagttttgaagatcatctatccacttgaaatatttgtttatatccagaaaatctaattaacataactataagtttgactattttaggtgactagatacaatctgtattcaattatgcattacattttaaaagatctgtataaatacaatacctacactggaggagaaatatacataacacaaaactgaccttaaatttgtgtcaataaatgaaaatccatactaatacaaagtattcatttctataacatattcccttttttcctttagaaagagattaactatgatcattaacatttataaccaactctgtataatgaaaacgaatatttataaacaatatttggcaatgtgggtgtcctttccaaactacttcctgctgtttgggggcactgtctaggggatcctaagaagacccagaaatcctggctgtagtggtcagtaactgcattgtcccaggtgtcttcaatgttggatcacctggtcattgcttcagggggtcttgcttcatcaaaccacatttgtttggaagcaatccacagcttttcattttctttgaaaacaaaaagaaagcctcttttccaaagtaacctgtcctgggattaaaggcatgtgccacccactgcccaactactctatttctcttttcctttttctattctctcccaagactacggatatttttaaagacattgcaaaccctgtagaggtttttcttcatctgaatcgcactttaatataaatctttacctttttctggccatgtgtcttttatctgaaaagaaaaatcattgctaaaattaaagctgtggctgttttagccacagtctttccgagatgatgggggtacatttacctccagcaccaagagctgtgctcactgccttggtctatgcttccataaagcagcatactgccagcttgaatctgtggtcactgccattgtgagctgcttttacataccattcaattgttagcagacctttgagaagagccctgcgggttttttgtggcttatgctgagtcaggaagactcccttaaaagagccactggagtctctgcttgtctctagcaaaacagagaccacctgagaaaatgctgctaccaagaatctgtgcttgaatttgttcttttgtttctaaaatccctttttaagtggaaattcatgccacaggttgagggcaccattatgtagcatgagtttttctggcccagctggttccctggctctatttcctcatggccttctcttactggaggaaaggtccaggcctctaattccattgaggtctacatcacacctgctcagcatctccacagagaaaaaggagcgatttcctgcttgtccctgcttatattctgattctgcctgctaggtcacttcctgcctggatcacaaaagatgacatgacaaactttgaagatccccctcagaaggcctcactatccttggggagtggggggggaggggattggagggactgatatttaaagtaagattgtttctaaaataaaaaaaaaaaacttttaaaagttaaaaaaataaatgtaggatgaccctatcttttgtataacctattatgaaaattatcttcatatccttttatgatagttcctttatataactaaagcacagtgttttactttgtaatttatgataaacaaatcataatttaagataatgtgagatttcatgatatttgtacaaattcacaacacaatgtcatggttagctcttagggaacaggcaattaacaatcttttaaagtattaaaaagggagctttttaaggcacataatatctaacatacaaaataaatattttcagggagcttgagaaaggacataaaaacggttgtataaccacacagaagaggagacaaaaagagtgtaatagacagatgggatgaatgacaccaggagagcaaggtgaatacatctctgaaacaactaagcaagctcatatgaattcacagagatggaggcagcaagcacagagcttgaatggatttgcactaggtcctctgcatatatattatggctttcagtttagtatttttatgggactcctgcatgtgtaaatgagtggctctcttcttgtacctgctcttggtctcttttccttcagttggtttccttgtccagcttcaatgcaatggcttttgctttatcttagtatatgtcctggaatattattttaagatgtattacatttgtttgtgctgtggaacatttgttttaatgatgcaaagatgtgttgcattctttttaaagctttcttatttaaattaaaaacaatcttattttatattccaatcccagttccctctccctcctgtctccaccaacctcccatcccacctcctatccactccccagggagggtgaggtctcccatggaggatcatcaaagtctgtcacaacagactttgtggggcaaggtctagactctcccccatgtatctgggctgagagagtgtccctctgttaagaatggtctcccaaagtccattcatgcactagggataaatactggttccactgccagaggtcccaaagactgccctggcctcccaactgacacccacattcagggagactggttcagccctattctggttccccagctttcagaatggggttcctgtgctcccactttctcaggtcagttgtttctgtgggtttctccaggatggtcttgaaccctttgctcatcactcatctctctctctccaactggattccaggagttcaattccagtcttaggcacatacccaaaggatgcacattcataccacaaggacatctgttcaactatgttcatagaaccattatttgtaatagccagaacctggaagcgacctagatgtccttcaactgaagaatggataaataaaatatggtacatttatacaacagagtactactcagcggaaaacaaagaaaacaaaacaaaaaacaacaatgaaatcttgacatttgcaggctaatggatggaactaaaagaaaccatagaaaccatcctgagtaagataacccagacccagaaagaaaaacaccgtatgtactcactcataaacagatatgttgcattcttttgtgttgcatttgtttaactctgtaaaactgttactttgcctgtctaaaaaaatctcattggtctaataaagagctgaacagccaaggcaggagaaaggataggcagagctggtaggcagagagaataaataggaggggaaaaagagagcaggggatcaaggagaaagaagaagaactcaacgggccagtaacccagcttcacagccagccacagagtaagaagtaaaaaactttatacagaaatagagaaacgtacaagcccggaggcaaaaggtagatgggataatttaagttaagaaaagtaggctagcaataaacaaagctaagcctgagcatttacaactaataataagcctctgtgtgatttatttaggagcttagtggcaagctcccccccccccgcaagagccaaagagtaaaaaatacatgaaaataactgcaattatattttcttttgttatttctcaaaagcatgttcttttctagagagagacagaaagggaatggatcagaataggtgggaaagtggggtagaactggaaagagcagaaggaggagagagtataatcaggatatattatactaggaaggaatcttctaaataaaaggaaaagtgatttttaagagggacatacaaaagtgactctaagatcttctgtttcattttctcctttaccttagacaggttttctgtgtcaaaattccatcaattaactcactgatttaagaaaacagaataccataaaataaatggtacattgatagtttaagtatgtgtaattatttactaaaattcagctgtaaagaggaaatcatttacaggtaaatcaggggaaaatactttgttactaactaaacaatgagatttttctctgaatattaaaagtaaattaaaaccaacattggccagaacttaacattgtgagtttgaatcattcacagaggcaaatctcatagccaaatcaacaaataaagtggctttgatttgatagtaattcacttccttgcccatgtttttaataaagtattactctaactgatctttatcaataaaacaaattgggagtcagatatcgatgtaagaacctgaaagatcagtgaagcagggagcactatctgctgcctccttaccattacagttcctccatccaaaagggccaagaacctctctttgccccaccttactacttcctgtctcctctctgtcaacagtcctccaaaccttcatggttatttaggtcaactagtagctagctccactctctgactccaagcaagctttatttttcagaacacagtcaaaatatcgcacaatatttgaacatgtgttttcaaggcacttggcatttctcataattccaatgggcatattgatagtcagatagttcttgctttggctagtagacttttgtggaggtgtctaatactgcttgtagcagacgcacttaattgctggtgatggactttagcatgtagagtattggaatgtatgtagcagagcagaactatgtggttcatagttaacagctgatttagttactcagacctgtgtgccacacgaggcagaaatacatctttgttatttctaagctgttgagaattttgtccgaggctaactatgcttgttggctgtatggaaattggaagactcacagttattaaacaatcctcatgctattttaaagactttcaaaagattaactaagcactatttataataccctacataaggagtacagcattgctactttgccaacggtctgttgaaccatttcagaggcagaattcatcagttgtcctaacacattccagctccattctgatgagtaccaccagtgacacagagggcgactttcatactttgttatataaagcagatgcctatgtagtcgaatacctccgctttccatggttcttctttctctgtgagttctttgtgaaatgtctgaggaatgtctagtagccttttcttcttatttgtagtttttacttaataggaacatctaaataattaaacaaatacagagctgtctcagtaaatcacatttttttgtatatttctaatagtctcacaatttcaaggtcaattttgggaaatattcttgcttctgggctaagaacagaaattagtaactgggaaagctacttggaaactggaggcaagatttcctactttcttatgttttgatttcttcatattgagcagtagtcatgcataaaatgtttgaaaagattaagatattatgagtagcttgaaacacagattggcatatgctggacatcattagatgggacagaaaaggaaaatgaattaacagagtttctctgtgtaacagctctgtctgtcttggaacttgctttgtagactagggtagccttgaactcacagagatcttcctgcttctgccttccgagtgttgggattccaggtgtgtgctaccactgcctggctgtatggtgttcttaagtacttataattggacagcacagtgtcaactagttttctcaatccatgtcattacaggtttatgataattgatgccaggttggtcttatgagacctcttacaggttgagatggtaagaattgtttaagttgccatcatattgcagtctgcttctttgatataataccagttccagtaatcttttatttatttatttatttatttatttatttatttatttatttatattacatccaggctccagtttcccctccctccttcatcccagtcccttcctctcaaccctttttgccccacccccacccccaatccactcctgcttcttttctgtttaggaaagggcaggtctctcataaataccaacagaacatggtatatcaatttgcaataagactaagcacctccccttgtattaaagctgggcaaggtgacccagtatgagaattagggtttcaaatcctgtaaacatgtcagagacagctccagttctgactattagaagttccaccagaggaccaagctacacaactgtaacatatatgcagagtgcttaggtcagtccattgcaggttgttatttcagtctctgtgagcccctatgagcccagcagtattcttaatgatgctgtatgaagcccaataaagtatagttgtgtttggaaattggttaatatgtatattctaagacataaacaaatgacattacaatgatgaaaaccattcctgtctattatagcttaaagccaagaaataaatttaaagtgtttaaacagattgaaaagaaatgttcctgcgtatgagacattataaaaatattaaattgaaatgttataaaagatgtgaagaacacacttgcctccactgcagcagatggtttcatgtaaaaagaatttgggattttagcacactcagaatgataggtggaattttgacaggtgccaaagacgtaagagcattgcagaggaaaggaacggcttgaaaaaagaggtatttcaaacatgtacaaagcatattaaaagtaataatcagagacatgaatatatgaaagcattctcaaagtaaccacaattataattattctcagtgtacaatgacctaattcttattaatgattttatttgtaaaatattctgttgtaatccagaaattagttgattaacacagtgaatgtgtattatatttacaccaagaacttcacagaggtttaggtgggtactttggtatgaaattatagtcaagatgtgagctgtcactgaagttttgtactgggcctggaagatccactccaaatcagtttactctatccccattatcacagggccccatcctttgttatatgagttttttgttgttttttgcaattttgagaatcctcatcacatggcaagcaatccattgtttgttaccaagaaaataagatacacataactcttaatgttttcttatgagcgaactttaaaaatcacaatatttttttactatttccttaaaatcctacttcattgaggaagatgagttgaggtagacatcattggcatcatttctgaaagctcactaccatagctgtctttgtgtttaaaataaaaccatggtccttagttaattgtgcgttagtatgagattccaagaataggtcactcatgatatatctatcagaaaatctcattctcatgagctaacctacctaatcatatggggttagaaatacatacttttctcttataaatctattcagtgcagtcttactttggaatcatcacaaagaatttataatgtgggatgttacatgaaaagttgtgagatgcttaatctagtggacagtttatgaagactccacttgaaatggatcaggaaagctactgctgctcccaggtgtcactaagttctgaagctaattcagccaacagcccaggacataaagggcagcaggtgttataccttactgcctttccaaagctgtaaatactgaaaattaaaaaaaaaaatcgaatagctgctacctttcaaattattgtttactgatctcagtttcaggttgcattttcaaatcataagtagttcacatggctttattgggcctcttgcatttattggtcccaagttcaatcaaatgaactgctgaaagttaaaacctgaactagctcatctgctgaacaatgaactcaaaacaagcctagggcagcaaacaggatcttaattgctattgctatttctccagtgctttgccctctaggtggctgtgtgacaagaggtctcaatgaattaagaatggtggaacaaaattcctgggcacaaatagtaattcccctgcctgttatctcactggcaggtctctccttagctcaggtaatcctacttaacacagtcacctggaggtgttaagagattatggactgccctcacttcagaggtcttgaagaggcttggggggtggtaatcacattacccttgccattattaagtacttattgaatgccactggagggctagacattacaacagagtatccattttgcacacattagaaaatgtatatgccctttacctcagaaacatattaacagcattgctcttcctgtcatgtttgctttcatttcctatggaatctttggggacgtcttaggtggtaaagggcacatttgattgcttttctaggatgaacttttatcctccttgtcagttcatcccagttgggaaatatgtctattcccagaaatgatctccttcctcagccatttctatagtgtcaggaaggcaagcattcatttcactttacacagtttaatgggaagtgtgaggtggtggagtgataactgtttgcatttgcttctgcttagcctctgaagcatgcaatatttcaaaggtgactttgtagattttggaatgtcccaggcatatttgcaccaagtactcattaagaaatccacagtgcccagcaagcacactcagggcaggtgcaggatgttgttcctgagctgaatgtaaataacctgtgaggcagagacactcaactacttcctcctggctttgtcatcaataaatattggagcccatttgaacagaggccatctagcatgcatgtatactatttccattttagcaacttggtaggtatatggaatgaaaaatcagactattgaaggcatttctacccataattttgaaactaaatgccatatacaaatataattctgaatttgtagatgatgaaattgtgtgttcgtttaaatatgagtattataacttacacgaaaaacactctaactttacaatgtgagggtgtatggtgactgttagttggataagcctcattgctatcaccggtgctttttatattaaaactctaaacccgcaaaaacaccctaatctccccggaatgcctctgtaatttccaaactcaaaaaaagacatctttaattttttatttaaaacttaaatacataaaaattttaaaccatttaaaggatgaaaagcagtgtctccaacatagtaatcatttttgtctttagatgttcatttttgattgtgctccaaattttccaacatacagtagcaatttgctgacattttcctcatcttctgcttactattatagaatacggcaaatatattttacccctactttttatttacttcattgcacaatacagaagggaatagcatgttaaaatgcaccattgttgaatgttttacatttaaatatattttattttgcaattacagatattttctagaagcatagaacatattcatccttttaaattgtctccttatagtctatttgcagaagcaaagaagaaaggataatatattcattaatgtacaactgtgaatgtgtgcatatatgcatagatttgcttgtacccacatattaaatgatacctctatctgtttactgcattttttggaactgaaatggaaagaaatggtgttttcttgttttgtttcattgactataagaagacagaaacatagacctactggaaattatgatatgtatgttaaggaaacaaatcaaaacatataacctgataagcatgagcaatgttcaatcaaaagcaaaataatgaagtcttcatacattatttgaagccacgggctaacccatcccctgaacatttccgtttgatagggacactcagtatcatttctgggcgtgtcctttgtagttgatttctgactcttgcaagtctaacaaacataagtctttgcttcccaaaataacacttttagcatcccagtgtatcccagataatttgatttgctcagtatacatacagtaccatattaataatgccatatgatttaatttgaaagaaatcataaatatcttaatatatcattgaatattaacttgctcctaatttacaacacaatagccaagctacacacattctccggattgaataaccaaatttctatcagatattgaggatgataatgcgtttaaattgttattcaagtaaaaagagtacgtgtgtctatctctcactgtgctccttcagcatctaatgtaatttcctgcaggtaagattgtaccttaaaaaatgagtgctttcaaaatacaaaaatatgaaacatatgatctttgtcaaaagcttttcactttgaaagtctactccaccattaaaacctccagtccagcctttatctcactaattttgtgttcataattttgttttgtgaatctaaatatttttagtttgatttaacttttgtaaaatagttaaaagtctctttatgagttaattcaaattcttagtcttaaagaagaacaaaattccattttggattcttacaaagaatacccttatctttatttttatcatcctattttcctagctatccaactgcatatttttaactttttggcttcatttccccccatattttctattttttgacttaaaaactttgggttcttttttgtcctcaagattgtcatttggaaggcatacatcttctgtaatttcaagtagagggttcatacagtcttaaaaaaaaatcatgagaccaaagcttcctgcatcagtcataatgatgataagaaaggcctgtgacattctaatgttcagatggtcaggcaaattaatcagaacaccatattttgtgttttgttgatatactttatatattctcatgatttttgtgaaagttatcttattgcatattttaacaccagaaatagttggctacacagcttttgttgtcagaagctttaacttattaggtggttggttctgtttcatagaagcttacttttacttcatgtcttttcttcatttgtattttatgtctataaactttcccctgagtacaatatatactcattacttgggtgacatcttcccatatgtaagagtcacacaaaatgaacttttgtaaagaaaatacttagaaattgtgggctttatgtcactcagattttttaagtactgctttattattttttgacagataaaattcttttcctgcaacttcttagttattcaattgttttctttaaatgtctggagaaaattctaacgtgttttccaaataagaaattggcagttttattatgttatctagcacttgtctgtctcttttctgttcccattatataaaagggtatgttatttcaggagtaaacagcgcttcttccttctaactggcattgtattcagactctatgattctagtgacttcctcaggagtatcattaaacatatttggatatttactacaaatgtcaggtggtatcctctgtgacaattgttcctgtctctcgtgctctgaaatagtttctttcttcttctctgtctctctcattgtttgctttgttaaaaattcttgaatttaaaaactgtcattttcattctatcacacctttatctcttcctacccatctttcctaagtcattctcagagtctgctttagatttcctctgtaacatcacctcatgttttatcttttgaacatttcccttagtacccaaggagatgatgaatgaaattggagaagtaggactatatgtactaaattctctccaaaccatattttggttgcctgagttttcagggttacaatgtatttagttctttcatatcaaattttcatagtgaatgttagtttctattctattcatccatcctcaagagagataaaatctattttgacacttgcttttgcacaaaagcatgtaaaccagttcttcccatctactgtgtaaaactagaaattttctttaatgtaaaagtttactatcagatgatataatttaatgttgctttcaatgaattcagccaaaaagctgaaagcatatattctgcatatatttttgaatatgctctgcaaattctgccttgggattattttcttcgactaatgccctatcttgctatccaataattagacaaacccacctagcctttaccatgttattttcttacagctatatatgatgccaaaattgcatatatatatatatatatatttgtatatattaggaaagtttatggatcaaagaaattttgcagcacatataaacccagtgctcaccacaattatatttatttttctgtgttacacatttgctactatatctaaagtggaagcaaataacataaaagaggtgacctccttatttatctgaatttcctctgatactttacattttccattttatcttgctatatttggttgtgagcctagcctttaacggctgagctatccctccagccctccattttatctctaaaaaaaggaagtaaaatattattactacttgtgtatgtgtgagaagtgaatatatccactttataaaagctaagtgagctatttaacttatgaattaacttatacatgtttcagtaagaacactgaaaatgcatttataattattttaaatatatcatgcattgcaattaactgcagtcactgtcatgtaccataaatttatatttcattaaaactctatgtcctttgactacatctccctaacctccttccctaccagtattgcatgactgtcattcaatattctactagtgggagcttgactttttacagtagttacaagagtaaaattatacagaattcatctttctatgcttggtttatttcacttaacctatttctcaacagatttttccagtttgttatatcaaattgtaaaattatcttgtttgttagagtttaatagtccactaagtatataatattccaatatatgtactataattttttttatccatcaatgcacactgagattgattctgtgttgtaaattatgctatgttgcacactggagtgcacatctctttgacatactgatttcaatttccttgtataaatatacccactagtgagattgctagatcacatggtagatttctttttaatttttgatgaaagttcatacagttttgcaaaccatatgaatttagactttcaccagtgtgtctgctccccgtatttccccaaccttaataatccttgttatcatttgatttttaactgtagtcgctctaacaactgtgtggtccaaacctcattcttgtttcaatttttatttccctaaaaaataatgatgttgagcaattttcttatatttactggccatttctttgtcttttcttgagaaatgtatattcagatccatttaatctttactctttacataactactgtttattagttaactaaccaactaatattgtatttttatttacttaagttagatttgttttatatttagtctagtaaaactttattagatatatgattttcaatatgctcttccattctgtatgcccatttcatttccaaggtttgacactcttgcaaatgtatgcctctttaaaaatgctaggaaaaaaacagtcagctgccatattctaggttacagaaatgcaccagtacacaaaatcttctatcactctgaagattttattttgtatgtcattaattgtccctagcctattgtgcatggcaaatggggcaacagtatcaagtgacaatatatagttatattttaaaagaaagccagtacttctgccttattgaaaattgatacccagccttccttcctacacataaaaagtatacaaaacacacatatgaatgaacagcaaaccaataccctgcctgaatgtggtaattaacctcatttttgaacaattggtatttaagtcaggattccaatgatcttatttttctaatacttagccttatcttgtcctataagaggctgatcttggggtaacatctgttcagctatgttcatagcagcattatttgtaatagccagaacctggaagcaatctagatgcccctcaattgaaaaatggatgcagaaaatgtgataatttacacaatggagcactttactactcagcagaaaaaaaaaaaaaaaaaaaaaaacgggatcttgaaatttgcaggtaaatggatggaactagaagaaaccttcctgagcaaggtaacccagtcacaaaaaaagacaaacatggtatgctctcactcatatatggattttacacatagagcaaaggattaccagcctacaattcacacaactagagaagttaggcaacaaggaggactctaagggagacatacatggtcccccagagaagggaaaagggacaagatctcctgagcaaattgggagcatgggggaggggagaaggacctaggagaaggagagaagagctagggtaaggaggacataaaggagcaggaagtttgtgtaggaggaagaatagaggagagcaaaataaaagataccatcagagaaggacacagtatagccttaaagagaaatcaggcactagggaaatgtccagagatctaccaggatgacaccaactaatcatccaagcaacagtagagaggctactttaaatgccctcccttgaaaatgagattgatgactaatttatatgccatgttagagtcttcatccagctaaacactgaactgaactggaatccagttgcagagaaggaagagtgatgagcaaaggggtgaataccaagctggtgaaacccacagaaacagctgacctgaacaagggggagatcttagcccccagactgatcactgggaaatcagcatggaactgacctagactccatgaatgtggatgtcagtgtggaggccttggaaatctatggggcctcttgtagtagatcagtacttatccctagcatagaaatggactttgggagcccataccacatagagggatactccctcagcctagacacatgggggagggcctaggccctatcccaaaggatatgacagactctgaatacccccatggaaggcctcacactccctggagagcagaattgttataggaaggtagggtgttagtgggaatcagtggaggaggtgagggagagagacctgggatggacatgtaaaacaatcttgtttctaatataaataaaaatgaagaaaaaataaaataaaataaaaacttaattttattaaaaaagaaaagaaaaagaaaaaattaacctactcccaatttccttacatttttaatatgcaaaataaatttggtaaagtgtggtttgaggtaaagctcaaatttaccacttgctgaattgtacaaaatttgaaataatataaattgtaatgagtttggatgagacacataaaactgtaccatgattttgaaaatattctctgcattcagcaaaagtcagtttggtgtctatttgtacatattcagtctttgttgcttccttgttgttctcacttaaaatctttctaaatagctttatgtttacagcattgtttataatttcataaacaatagatgtaagcagggcttattagttgagctcgaatttaattttcatgatatggtcagtaatgaggtagtcagtaaataccatctattgaaaatcctacagttttaatttgcaaatttgaacattctaatagattaggtagacagtattagttttggttttgaattatatgaaaatgaatttcttctgatgaactatcactagataatggagtattttggtggtttccattatcatttgattaacaatatacaggcctgtattttctcaatagttgccagttcatatctttatggattaagaaaaggttgccacatttatatactgtaatttgtaaataattttaaaagtttaattttaataataattctaaaatactgatgttcaagagcactgagcttgtcagaaaacctctgatgttagtctgtaatctgcttctcaatctccaagaagccattcaaacctgaacaacctgaatgtttgtaattaattcatgagaaaagcaggaccattattgcaaagttatgtattatacaagtacatataaatcacaaataacttgccagagtcagtcacatactgataagcaaaagagttaggctagcaaagttctcttaacaaaatgtacacccaaatgtcagaggacaaagtgtgctgtcgagcaatggtgtgaaaccaaattgctgtttatgacatgatgtgtctgactgcttgttataattctaaattatgggaaggaatggaacctaatacagtcttaggagaaagcataaatgcagaacagctaacttgcacatcaatgtttatttaaaatctaactgttctgtttccatgcagagaccgtaaagaacaagctcagtgcttctatacatcaggagccttttctgattatacgagtgaatggagtaattaagtcatgctgcatgcagaaaatcaggttcccagcaattattcccctttaggaagataagtttatttatcagtgtctactgctccacagttcaaataaatctttttctaagtgaagcatctgactgacaatccatggctatcaggagagcatgaccattcaacccaatctgagatttacaccttagctcaaaacacactctagtgtaatatgcagcctccagtcttggctgacagagtgttggtctttaatgtgacattaaaatcaattattgggaaagaggagccctactaaaaaaatgtcttctttttataatctgtcacaccaaagcgagatggggattaatattctcatatgttattgtttaaacatttaatttctttttagagtgtttttgagctgtgagttgttgatgaacccatctcagtcatcccaatttgcatatgaaatctacaatattttaacatctccctgtcaccagtttctttatctacttgtaggtgttcacctgtaaacagttgaattctaattggaaatatatatatatatatatatatatatatatatatatatatttgaatagtttacctcatgcttatttaatatatcttctagatttgctaatttggtgattataaccaaaaaaagaaaaggatatttccactttctggaatgactgaaaatagcattcaacttagttgagcctaaatttgtgggtaactgttggcccttcccatatgggatatatttaaatactcccaagtctgttgttttctgctctttttattttcagggggaaaaaaggatttccagccaaatacagaccgtgctctaacaaagatgatactggggatactggcatggaaaaaatgaaactcagcctgtagcaccattaatgtccctctttctgtgtcccctgtttctaaatttttcaaatttaaacagttgcacagaaaaaatagagtagcctaaaaactttataaaattgatccaaagtttatgccaagttcatccaaagaaaagcctcctctccccagttttgaagcccgctgtgagtatggaggtctttcagtgacatatgtgtgaaaagaaggcaccaaggaggacttggcttatgtacttagttctttctgtctggtttagctataagagtggcttaatctctttccttttgtcattatgaagctccccagcctttccccttaaaaacattgcagtgtttgaagaccaataggttttactaaattggacatagcaatatttatttgaatctatattcatttattcattcatcagatttgtactatggtggtgatgtaataaaaatattagatgtcggggtaatattcacaggattgtgatttcttaattgtacaaaaaggcaaattgcttgacaacagaagcaccttcaatttcagctctattatgataatatattggaagtattaatgaatgaatgaatgaatgaatgaatgaatgaatatattttgcatcccaggtgctgtttcccctccctcctgtcctcccagtcccttcccgtcaacacccttatgttcccactcccaacccacccctgctgcatttctgtttcaaaaacagctggtctcccatgaatatggcacacatatcaagttgcagtaagactaaacgcctcctcatatattaaggctgggcaaggcaaaccagaggagtaggatcccaaaagccaataaaagtgatgaagacacagctgctgttcccaatgttaggagttccacaagaggacgaagctacgtaagtgtaacatatatgcagagaaggcctaggtcagttttacaggctccctagttgtcagtctgtctctctgagccccaatgagcccaggttatttgattctgtgaatttacctgtggtgtccttgactcttctggctcctatagtcccctcttatgcaggatttcccaagctcggtctaatgtttggctgtagttctgcatctgttgctctatgaagtctatctgatgacaattgggctgggcacaaatctgtgtgtgtagcctaatgcaacgggtgtttctttggactgccacctcccaaataatggtacaaaacttattattaattaggaatgcttgaccttagcttaggcttgatcccatataacatttaaatacttaaattatgttctgcctcatggatctccccagtaccatccatctgacttcatccacatcttactggtgattcccttgcctctcattcttcccagaatttctgtctctgcccagaaataccagctatactctcttgtatagctattggccattcagatctttattaaactcatcagaagatgctttagtcaagtgaggtgaaacagttacacatctttatatagtgtgatcaaatatcctgcaacagcagagcattcttgggcatcattacactcacagttttgtttcctccaatcatgttttgttctatcctaggtctctgggtagtctaacctctgggtcctcgtgctccgtgcagtgccagtggtgggcctcctctgctggcatgggttttagtctagaaaggtcatttgttggccatttcctcaatctctaggtcacacttagcataatacaccccatagataggaaaaacagttggtttcttccacttgaagtcttgcctagtcacaggtcaggtgacatacatgctaaagactaggttcacaaccaaaatataaaagtaatgaaagtatcaaaggaccattcccatggaaaatgggagtcatgagtgtcatgaccataatgtgttctagactctaaaatcaaggtttgtgcagtagagtaaaaatgagacaatttctgattttgtaattgatttataaagttgttaaataatcatgagaagttaatatttaaatgctttcaatgatatttttatcataaaattcagtatggtaactaagggagatgagaaataagtcacctagcatgttgttcatacaaagtagctctataagtatctgtaggtttaaaacatgattgaatgtcatagtcatgaacaaggacagtagaggtaaaaatattgcaagaccaaaaacagaaacataaggaacagctgtgaagatattgcactcttccaggaaaattattaaaatcttcacagtgaattacaaatctcatatgaaggactaacattgagtccttgagctcacagagaaccttggtctcttaataacgcttcctcaaactggaggttggagatctcagaaattcaaaatgtatttcgaacacaataaatgcttgctccctgtgtgacatcagcactctgccatgttgggaggtataaagatgcatgcatctcattgtcctgagatgtgctttggtgcttagttattgacacattctatactgtagaagctatagtcatgtagatagttaaagcagttatcttggagtatagagcagagtccattgctttgatatcagatgaagactctacaagtctccttaaagaaacctgaaatgcggaaactgaaatattgaaagattttatggtaggctctaggaagaataagaaaggcctatgtataaaagtgtcagacttatttaactcaaagcttttctgtctgcaaatgacatatctaaattgtattttaaaaagtgaattagataaaggaaaggagacttagaagagactaagatatgatgccatttttttcataaatgatcttctggtaaatatgtcagaggtatttttgtgttcaataatgcaatctggtcaaggtcttgaccatcttctatccatgcaatcaaaggtaatgatggtgagttgttttattgaacaatataacagtgtttgtcaaaatgttctgttaataacctcccaatgaaacaatgaataaatcctagggactactttactcagacataagtaaactaagaagtgtggtgccgtcgggcgttggtggcacacacctttaatctcagcactcgggaggcagaggcaggcggatctctgtgagtttgaggtcagcctggtctccagagcaagtgtcaggataggctccaaagctacacagagaaaccctgtctcaaaaaaaccaaaaaaaaaaaaaaaaaaaagaagaagaagaagtgtggtaccttcaaaatgttgctttgtcagtacttctcatgtgcttggtaactgacagatatgaacataggcccctgcattacacttacccttattcttgttctctatccccaccagtctcttattggctatccaattatttatccagtcttgcttttaattttaaccttttattcttgtctgttgagctttaatctgaggtgtgtgtgtgtgtgtgtgtgtgtgtgtgtgtgtgtgtgtagagatatagatagtgatagagagagagattttttcaattcaaatacaccctttcctcctcaacttgcttttgttcttgatgtttcatcatagcagtagaagccctaactaagacacatagtaatatgttttgagaaatgtttgtatgaaactttctctcacagaagatgaaaacaaacatagagacccatggtcagatattttgtagacagtgtgagaacttggaacactaagccttaaatgaaatttctccatcagttctctccccttggagccccatggaagaggagacagaaagaatgtaagggccagatgggaaagaagtcaccacaaaaacgaagctctctaaatcagcacaagcaaagctcacaataactcagagactgaggcagcattcaagggacttacatgggtctgtaccagttcctgttctatatgctgtgacttcaagttcagtgtttttataggattcctgagtgtgcaaatgagtggctatctgaattttataactactctaagactttttccttccatttgtttgtcttgtccagcttctgtgtaataatttttgttttatattattatattttgtatttaattattatcacctagaaacctgttcttttctaatgagaggcagaaaggtagtgaatctggttaggaaagtaagtggggatgaactgacagaagtagagggagggaaaaccataatcaggatatataataacttattttcaataaaggaaaagtatatgtaaacaaagtaattgtatgttagtctagttcatgaatacctcacacacatagcagttaaattacatttaaatatggctacataaaggaagttaaacatgggaagtgtcttgccccaacaatcttgtagggacccaaacctcacagttgtatttgagatggttgtactaggaagtgaggaagtcatagtgcagactgtaggtgagattgacattaaaatctcaatgatcttgtcacttccacctctgaattgaacattttccaacttctgaacattgaactatggaaacagttctgcagattgaatgaggtttgtagaaaaatctgaccatttccaaacccaacatatcctcaattgaattattaagtacctgaagatgtgccgttgtcagattgtctttcctaggaacaatgcttactgaatgttttagtgtcaaatgctaaccatgtgaaatggatagatttgattgacctcctaacatttcctttgaggaatctgtccagtatacacatatattcactagcctgtcagcttaaggcttatatagttcatatacacttgtttcttggcttaaaagtatacaatgcagttttaatgattgatgtaactaaaattaagccttaacatgaataatatagcatcataaaatttaatattaaaatatatgcttttttccatactcgagcactttatctcatggttagtattaaattggacatagtaacatttaaaacaatttctaacctataaatttcaaatagacttaacactgctaaatataatagccattttatagattctaattttctaggtctcacaacaggataagtttttcattaattctttgcctctggctcatccaaacccatatttttcttttacttaactgtttaaaagacttgctttcacaccaaggtgaacatcacacaaagaaaagaaatttcacttttgcttagttttattatatatttgtatttattttgggagaattttatacatgtgtgcacctcctgagacataacatttgttttttgactgtaaccagagtctagactacagctctgaagatggggatcaggaatctaggaatttatctctgtcaaggcttggccatgtgaaataatagtggagctttagtctcagagtagcatatagggttgagtaataagccaaaattcaaaatgtgagctcttctagtgtgttagttagtccgtagtctggagtaattcaaactcctcaacattttaaattttttttctgagtctattatattttagctaatttgcacaatttgggtattcctttctattgaccaggaggtgaaacaacgggcacttttcatgtttatcattctgatattagcagaaaatgggaggtgaagcccaaacccaaccttgatggagggatccaaattcaatgaccacttaacctactctctataacagtattgctgctatgtattcattgtaattagtaattaaaggaagaaacagataaatgcagtttgcaagttgggatgggatccagaaacagtgtgtgaccttgatgagtaactgaatcaatattcaaacctgtatactcacccaggctgatttgttgagagacactcccttatcaaagggatgctaacaagtctgagcagatttctcaatgatgtcatgatggctttttccaaccttacctgaccttctttcagagtcccagtgtcactcttttgacagacctccctcctctctctgtccttcaggcagtgtaaactttcaacttgatttcatctgctaacccccagcaacatattaaagcatcaaagaaaggactttatctcaggtatattttcttatttggactgcattttgcattcactgtttatttccacttatgcagttatgtacttattacataatactattttaatagaaatactatttgattattatagaaaagatggtatcctcatgctttttaaaaaataggatatatatatatgcatatatgggtattataaatgttaatggtaaataaaatatgcataaattcatttgcattggacaatattttcctcatataaactgatttatttaaaataaataagctaacatttatttttcttttactgtgggcagaattcaaagccctttacacataaaattattcactgatatgcttattttaaagtcaaggaaagtaagacactagtgtacacacagctaattcgcaggaaacctggcatttgaacagagcctgatgctgaatatttattgttactcaccatgttctatggcagtggttttcagcattcttcatgctgtgaccctagtaaagggtcataatgtaaaatcttatatgtagaatatctcacatgagactgcaaagggttgagatccactgttcaatggcatcttagctattctagatttctgtatccagaacataacaagaagaatccacaattcagaggtattagtacaggaaactgtgtttgtcaagcaagaaacattgtgagtgcttaacatcttaggaaaaaactcatcactgtggaaatttgtcatatactaatctcttaatatttgataaaacaataatacagtgattggttttttaggtttaagccattaaatatcaaatttctagaccaataagaacattttatgcaaatttattaaatatacttaaaatgctacataagaatttccctgtaggtgttaatattaagtacatcggggccacacaaaggtgatcactcaacttttggttgggagtagacaatgattttagtactgtttcttatcctgacttcaaggaacatgtttgatctgtgtgaacactatcttgccttgatgtttgacatctgaactattttgaatcaaagtcaacttccacttaaataaagctacatacagaatattacaatacagaattgtattttgtagtaatagaaaatctgaaagacaagtatgtggaaatcaagtagggacatattttctttactttccaacattttgagtgggaaaaatcaatggttttaatatttaaaatgttaaatacatttgtggccattatcattcatgagaattagaaactgcttaaatctaatgtaaatgaatgttagtaatataattagagtgaaagaatatagtctaatcttgtttgttgtctttagatctttgggtcctaatacaaatctcagcattgaggtgatgtattagcatagcccctccatcctggcttgcaccaattgagaaattgaataggagaccggaagatggagcttttaaagaacctgcactaaaattgattgtggttctcaaaaacagcttacgtgggtgaaatattgggtttctgcgtgattattatcaaagatactattgaagaactcaagcagctgttgagaccatagactggatagtgtgattatatgtaagggagcaattctaagtacattgagttctctgcctaatctgagactttgcatagacacccacaaattcagatgttttcatggtgcataaggacacagacattaaatcctaggaaacagtgttttaaggaaaccaccaaaatagcagtacctttggcagcacaaatattgtaaagtcagtagaatgaaagacagattaggaaatggggatcctgatggacatataaacttccattcagaagaaaaacatgcaaacagggtctctggtatagaaaacagaggccaccatcttctcttgggtatggtagttatagggtagaaaagggggatagacaatgaaattttctctccatccccaaggttggcctggccattgctagtaataatctgagagtggttagctaaagattgtcaggtaatcaatcaccagcatcccttctggttgaccactacttggctggagaggacaggaatctagagaaagaaactactttagctataggaaccaaattagtttcaggaattgtcttgctgaaccaaagtagagaagctttacaaaatgatgtatttcagctgtcaaatgctgttcttagcattaagtagcttttactcaaattaattttggtgaatcaaatttttcatcagaacttaaaacatactcattttagggacagagtggcattagaacaagagagactttgatatgctaccataaaaaggagaagcctcacacaggatgagacatacaaactaaaggatagagaagtctaaagaggttggggaggggtgggaaatgcattacacataaagaaactagagaaataactttcagtactttcttaacaagtcaagtggtaggagtagcagtaatgagaataaagcagtctagaatctagaacttgtagcacattagaactcagaccaaatactcctcaggtcaagcacatgtgcagctatgtctcactccatcccagagctaatttctctattcagaccccacagtagtagccttgaagttatcagggaatactggtggcttaatctgtattatagatattcattaagtaaatgagtccctttccccacttgcaccatatcaacaaggtcacatgatttctaaattggctgcaagatctctatcctacttcttgctgcccgggaataagagacaaacacagaagatgaactattcatcaactgcatggcacagaacctctcccttttgaaacctgccagaagagacctccacttggtagcttgagcctgaactctccttagagaaccactatactgatgtctttatgtttctttataatattagtgcctcttccaacaaatctcttagacaaaaggacaatctgccatagtgtctctcttgagctctaaacctgaagcctttcatcatgtgcctctaaccctagcacttgtgagataaaaacaagaggaacagaggcttgatgctagtgagttcaaagttaacctacattgtgtaaaacacatctcaacaaactaaaatctaaatatatacacttttaaaaatgaaaagaaaagccaggcattggtgacgcatgcctttagtcccagcatttaggaggcagaggcagaggcagaggcagaggcagaggcagaggcagaggcagaggcagaggcagaggcagaggcagaggcagaggcagaggcagaggcagaggcagggcagatctatgtgagtttgaggccagccttgtctacagagtgagttccaggacaggctccaaagcaatacagagaaaccctgtctcaaaaacaaaaaaaaaaaaaaacaaaccaaccaaaaatttttaaaaaaagaaaagaaaagaaaaaaaaaggaaaggaagtgactttaagcatgtaaggtaagagttatctaggcatgattcaacaccagggaaataaaaggctcccaagtttttcaatagaatcttacacacaaagtaacagcattattctggttttgaggagactcaaacacaataaataaaatcaagatgctaaaaggtgcacagatatgtaacaatgggaacctattgtagagaggtagcaatgtaggcatagaagaggtcagctagagtgagctagagatgcaggatgacatggtcaacaggctgttatggggtctgttggggtttgcctgtagaatgagcactaatgaactaaacaatatcaataatgtaatccaagattcacagggaagatgagtaatttgtgagtatgcaaaaaaagtaataatatggctatggataattttataagctgtgaaatatgaagtcctatttaggatttgcgaaaaataattttctttcttaatttttatttattattctctcaaacattacatcctggtggcagtttctcctccatctttcccatcctccattcccacatccattccttcttcatttccccgaagtaaaatcagggatatcaaccaaatgtggtctatcaagtcacaatctgaggcaactcccctcagattaaggctggataaggcaatccagtaggagaaaaagggttctagaaccaggcaaaaaaaaaagtagagataaccccactctcactgttaggagtcccacaagaagaccaagatacacaaccatctcatatatatgcagagatcaaaccatgtagctccctggttgttgattcagtctctgtgagctcaagtttgtggtgatatattatttatgatttaacaaagcttgcttgagggttcagaattcaaagccagccacaagccatgtaggccaggcattggtggtacacagctttaatcccaggactcaggagacagaggcagatggatctctgtgagtccaagaccaccctgggctacacaagattgaatcagtccccaaactggcagagctaatacctttaatcccaacacttggtatcttttttttttttttaaatcccagcactagggaggtggagacaggagtgataaggctaggcagagtaagggatataaagcaggaggagacagggactcacaacatttgtctctgaggatccgtggagaatattgtctctgaagattggtagaaacaggattgccattgcaacttgatagagataagagctactggcttggcttctttgctttactgatcttcagcttgaacctcaatacctgtccccgggtttttattattcatgctacacagattagtggtttctttgggttttcttgtgctgtccttcacccctttggtttcttgtgatgtccttcacctttctggatcctacagtccttcctccctatcttctttaggattccacaaggtctacctaattttggctgggagtctctgcatctgtttccattggttcctgtgtgaagcctctctgaccatgattatgttagtttccagtctactagtatggaagaatataattaagaatcattttattgacttttttcccagtcatgtttgtttctatcctagctctctgagctatccagtctctggttccttgtcctccaggcagtgatggtggtgggctccctcttgaggcatgggtctcaaattggaccagtcattggatggatactcccacatttttttttgccacctttacccaagcacaacttacagataagacacatttcaggttgaagatttttgtggctgggttggtatcataatccctccactggaagtcttaacttgttacagtagatgaacagtttgggctgtgtatccccattactaggagtcttagctagagtcacccttttagattcctaggagtttccctttcactaggtttctagctcaaccccaagatgcccccacaatcccagttgtcctcccagtactttctctctccatcctcccctgacctgatccctcttgttcctgtccctacctgcccccatatatctattttatttccccttccaagggagattcatgcatcctgacttgagtccttcttgttacttagcctctctgagtctgtggcttgtagtagggttataatttactttatagctaatatccacttataagtgagaatatagcaactttgtcttcctgagtctgggttatctcccacaggatgatttgttttctagtcctgaccatttgttggcaaatttcatgatgtcactgtttttaacagctgagtactactgcttgtgtaaatgtactaggcactttctttatccattcttcagttgagggacatttaggttggagaaaaataattttctgaaccacaaggcttgcttatatccgacaacttttatcttccaaacattgtgaacattgtaagtgcaattacgatctggaggagacttgtggcgtgtgcaaatcggacatctaaagagactagatactcttagggtaacacatatttctcattcgtgttcatggaagaggtactgaggcatatgctttttatgaattaaaatgtctacatccaataatatgtggatattttttcactgaggagaaaatgagtgttactgtattttaacttcaatgaagcacttataaatatttccaggccacatttagttttctgtatgtcctccttcctacactaccacattatcaatcagtcaatcatccgtttttttgttttgttttgtttttaatactggccaaaactatcatgtgcatcttactccaaatattcacagagaattggattttccaagaacatacaccagaaatctattgtaagtaccttactccttttccagtgttatttgatgttgtgtcaaaggaaggaatctgccttgaccaagagtaatttccaaaagcactagagtttgtcacactctcgcataccaagaaaaatgccagcagcacaatgagctctgagcaaaaggaagaagcctaaactccaactacatatgatttcaaaacatttgtgtttgaataatgtgtttccatgattaatttaaaattaaatgaaatactccatttgattattcatttattcacaattgcctgggtatagtttaagttctccaaatctatttgcaatataataggaaaggcaagtttgccaaagatttcaacattcttttttttttttttatgaaagtttaacaatggagaaaaggatttctaggaaaagtgtctcttcactgtgatatcagtcaactgcttatgctaatgaagacatcatcagtcctgtaaaatgagcactgggcatcattttgcaatgaacagaaacaaaagtccatcaattttggtatttgtcagttgggattctgtcaacaataacagcaagaaatagaaagagcaaaggtaagaaatttgtgacttttaagctgtcttatttggggtgctatttgggagctcattggtaaggtcggctgacgcaggatttcaaaggcaattagggtgaatcaggctgcagaatatccctatgggctagtttgaagatacctgtgcaagatgctctttttttttttctttccgctaaccctgcttgctgccacatctagcagctgctttatttttgacaattcgtcactcctgaaaaatgtttgcaagcagtttggataatttccaattcattcttgcaggaaatgaggatttgttccctcactggggatacctgctgctaggtttattcactaataagcatgataaatgttttagcctttgatcagtgctaatttaacaagtaagctcctcaagaagaagaaaaaaaaaaaggctttgaggctcaggggctcaaggcagcacatgagttggaaatatgattgattgcattgctgtgaaaaatttccataaaaaactttttatcacactactctgttctgaacaattaaaccaaaaatgaaagatagctaccctccaaagaaggacagaggcagctcagccaactttacaagatgttagtttttaactggctcagaataatcttgcaaggaaatagatttctttcttatcaattttgccccatgtttctcaacacaccaatattttcttaaaccctacctttacttaccatcttcagacatcagccttccctgcttcttatcagacctctaagtgtgatttaaataaactttcatgtgaagtacattatggaaacagaacaaagtaaggagggaagaaatggatgctttgaatttggaatctacttgcctagaagtgtttccatcataatttatttctgaaataatggaaattattaccacttgctcattgaagagcagtccacctagccgttagtggccaccaaagtagacagaaaaagtgagggcacacaatagttattggctccatatatatcaagttttgaaacctcaccagcaggtaactacagagattttggccatggtaaaaatgaatcaggtttacagtttatcatgaattaattctgagactgtatattttgtgtaataaattgtactcccagtgcacttttcaaaatatctagcaaatgaaaagtaaaggatgcaaaagtaagtgagtcattaagggccacttaataactagcatggtattcccctgaaagataaaatgttatatggatatagttgtgggaattatccacacatcaatgattttatctttctgttgtttggttttagttttaagctactaggtgaaaagtgaaaattttaagtttatcttctttttacatataactttctattagcatttaaaaactaagcaataccttttgatcatattcttttcccttcccccaattcttcccagatacaccacacgacccaacatatccaacattttgttattttccttgttcataaaagtattcataaaaatccataaataaatattataaacttgtgtggcgttaaatgtatgtaggaacagtctaagggcacagacctctgtggacttcatgttgcagaataggagagaaggtagagagatggaagagagttacaaagggtgctccttcatatatgccttgaaaaaggaatgacagcattaagcatttgttaaagagattgcgctatactaaagcatattaagcattaaatttattatataccatgtgttcattattgcaaactgtggataaaaataattgatttttaaaagaaggaaaattctcgaaacatatttagtttctgcattgacatggcaatacttgacgtttactccctgagaggtaagacagaaaaatgtgatgactaaaattttataacaagcccaaaatatataatttccctcatacttgttttttgtatatgtgatggtaaatatgtaacctagaagaatattccaagatcagagtagagagtttgaatcacattacaaaatgtgaaatgttttgggaattaaaatgtatgtactataagagcaaagtaaactggagaaggtagagttaactccattctcagaaaaagccactttgagaaattccctgcatgtcacaaggctgtttcagctccagccatggaaccataaacagttccaaggagcacccaaactgtgcccaccctggaaaaagtgaccccatccaggtgatcaggcaatgactaattttgataaatagcatcttctcatcacaatttcccttgtaggcaactgttagtaacaattttgaaaattcccttagccccatgtctatgaatccaaaggtcacctactcttatccaatcctgaacagccaaggcatgtaccagcctgcatgcagttttttcctttaaaaaccccttgcaattgaggtcaggcacccttttcctgcagctgctgtaccagtttgctgaacagggtctctgccgaggcttgtaacttaacgttaaacctcatgcatttccatcagtgagttggctctttggtggtctttttggggtctcaggaacttggcaaaacatatggggtctcgcccagcaaccacaacacccccccaccaaggactcctaaccccgaaagtttaattttccacaggtccagtaagtgttttgtgtttgtggtttccttcttttctgtttctgttgctagttgacaatttgaaactttaagaaaagatcaatccaaagctacacaaaaaagaaagaagaaagaaagaaagaaagaaagaaagaaagaaagaaagaaaaaaagaaagaaagaaagatagatcaaggagaccttggcaaacgtgcccataaggttagatctggaggaagggtggaagggtcaggagacattccccttcctcgagtggatagggcttgctgagggctgccctgtcaggagtggacaggggcctactggggcctgccctgtcaggtgtggacaggagcccggtgggggctgccttgttaggattttttaatccaatttgtacttttgtaaattctgtaacggctactggggagtttgcctcccatttgagaatttgaaatttgcaagtctttgagatggacccttccttttgtctaaatgttgtgtttgtttgtcttgtcttgtcttgtcttgtcttgatggtattgacagtacggatgttgatcagaagcaacctaacctgggacggacactttcctcccctcagccttccagcgggtctctgcctgactcattggaaggacatgaaacagagaatctgagattgtggttaaaaatgttgagaaaaaatttttgtttaaggaatactggcagccaaggacactctatgctgctccccaactcgtttccctcctaagccaaattcttcttcactgtggtaacaatcaaagtctcttctgctggccagcagcttcctaccttaccccttctctgtcctgattctgcttggaaaaaaaaattgttaaattatgccagtctgtatactgtgagaaactttgactttaaaataaaagtcaaacatacattatgtttggaaaaattatacttttgtttccacaggaaaaaaatacagattttagttatttaaatataatgggttacatttaacttgtcatcatttaagatgtttcaccctggtaccagatttaatgtgttgatataactatagagttattaaaaccaaaagaaggacttttggttttaaaaaagtcctttggataaaagtttttatgttgactaaaaaaaaaaaaatgagagaaaaggtaggagactaaagtaataaagagggaaagggaaagagaaatttgtctaaagtaagaatgtctaagggaaccagaaaaagaaactaaaggtaatatagaaagctatagaggggcaaagaaagttgttaaaggtcagagtaaaagtcatcgaaggtaagagagaaaggtaaactatgtttgctgtggtttctcatatctacaaatatgaaattttaaaaaagtggtgatgtaagttaaaattttaactgtataagattaattctagtttaaaaactttgcttatttctcaaaaaatgtttatgtttgttagaaagttttgtctatattttctggtgtacacctctatacacaagaatgctaaactttgcaatttaacagtcacccaggtgataatggttttagagtcataaagggtattttatttttgatgttgcaaaaagacattgagagattttaaattaaatttataagactatgggatatttgtgctcatcaaatgtttttattgttaatatttgtacttgaaaagctaaaatttaagataatagctataagcactatatgctaaccaaaaatttggatttttatttcttgtgatacagtaagacaatgacctaagtctgaaaaaaggcttaaagtagcttttaagcccacgactctcaatcctttgggggttgaaaaaacatcttttcataaggatagcctatgaccacccgcatgtcggacgtttgcattgataacaacattggaaactcctttaaaaggtcaaagcattaaatttttaaagctatacctaacaatgtaaagtcctagtcttataaaagctgctaactaattatattgtaaaatgttaaaaaaataatacaaattaatactcacaaactgtccttgtgggcaactgttagtaataatttgaaatgcccctagaccgaatgtcaatgaatccaaaggtcaccaatcctgaatagccaagacatgtaccaccctgcctgtggttttttccttaaaaagtcctagcaattgaggacaggcacccttttcctgcagctgctgtgtcagtttgctggacagggtccatgccaaggcttgtaacttaacgttaaaccttatgcatttgcatcagtggaatcagctcattggtggtctttttgggcgggtctcatgaacttagcacgtcatgtatattttgaagtagaatgtgtagccaagaaagactgcgaaaataatgactacaaagatgattaatttgtaagcatagttcaatatcttcactctcatgtatattatagacatctgagaaaatttggtttcaataaacattttgtcagtgcagaatgagtgggttggttcaacaatatctatggagcctcacaggtacagacacggtcaggtaccaggaaagactacagagaacatgtaaaaattctaagttttaagtagctcccttgatttctcttgtttttaaaatatctgtgaaaatgctgggtcagctgtttgctttcttttggcaaagtctaccaaatgttgttgactcatttcaaaaaacatttaggttggttgtgatggtattttgtttgtgatttaaagattgcatgaagatcagagtgtggagctaattaaacacacccttcaacctagtgcttgtgagacaggcaaacaaatcttggtgagttcaaggccacctagacctttgaaattgatccagtctagaggtagtggctcacacctttaatcctagtacttgggagtcacatgcctttaatcccagcaccagggaggtgaagacaggaaagaatgtggctgagcagagagaggaatataagaggaggcaggagatcatgtcatccagagcattcagtctgagttttcatagaaacaacatttgtttgaggattcctaaagacagggcacccattctgtctgaggattaagtagaggtaagaaccagtggctggatgctctgcttctctgatctttcatcatttacccctatatctaactctgggcttttattattaaaaccaattcgaattagagttacagttggtagtaaactggcagtgttgttatgcaaaattttctaaataataaagaaaatcaaaaataaggagattattgggctgagattctgggacccagaggaagcctaccttgttagtagtatttctgaagatatatcaccttaccttcctgccttggtctccaaatctgtgtattcaagcctcaggcagggactttgtgcaagttaggttttgtctcacagcatacattagagacatctggaaaaggtaaaccttcattgaggaattgctttcattagattgtggtgtacaacatttttttcatcgataactagctgaggagaacctagccctctatgaacaatgacaccctgataacttgggcaatataagaaaggcagagtagcaatccctgcaaataatacagtaaacagaattcattcatggtctttgcttcaattcctgcctctggcttccttccttgagctcctacattggcttcccttggcgatagactgtgattcataagtggaagtaaacattttcatacccaagttgattttaatcagggtcttatctcagcaacaaagaagcaaactagaatagtaattaattccagaatatattctttgcttatggacctgaccatgtggcttttagggcccagaatgttttgtggaggaaaggcaaagaattttgaatctttgtggtaatctattgagtgctcaaagcttactggatcattgtgcggactaagaagaaaatgcagagagcaaggcatgtctggcttgtgtgcaaaggctctaacaaggttattcatgtgctacctttgactaaaactctttggaaatgctgtatttatcaagctgggttacttgatgaaggtaaactgaagtgtaagaatcaactatgttgagtcaaaatattctgggaattatcttctcagggtcaatatataaaatctgtagtccagagcgggtcaaggctgcatctcaaagtagcagctgaccttgatagtgtgcaggagtctcccatacagcattgagtttggcaacatcaaagctgtatgattgaaagtattattgggagctgctaaggcttggctctgacagaagttagaagtcactgttgaagatgtaaactttggttagagtaaaactccagagttggaaagattgcaggaacacaggatggctgcctacaatagcagcaggtgtgaagaacaagcctgagtctatgaaacaaaggtgttttacaaatggctgagccatagaagtgaagtcatccaagcccattgggactctggaaatcatgggtgagtcatagatgtcaaacatggacagatttaccttgttggatatttgtttgctttttacttgatctgtttcttaaactgtgctttgctctctcttagagaaaatatgcaatttttaaaaattttacaggagtgtccaattaagatactttgaaattttaaagaatttttagactttgaagttttgaaacacataaagatgatgggacactttgaaatatagagcttttttaaaacttattttgaattaaactgttacattatccccttttctcccatcaacccctctcagtcacgacttttctttctttgtcattgttttatatatatatatatatatatatatatatatatatatgtaggtgagcaagccagggaaaaaaatccagtaagcagagcttctctatggtctatagttcacatcctataccaaggttcctgccttgacttgctcggtgattgactgtatcctgtaagcagaactaacctctttcatccccaagttgtttgggccagtattttaacacaacaacaaagaagcaaactggaacagatttggtctgctaccacactgtgtataacagtacaacagtacgaatgctagaaacaatgtcacattcttcttactggaaaaactgctcctctatagattccaagagctgtttctgaaagtattcttatagaattacaacttgagaagtgaattagtagaatattatcaggaccttcaaatatataaagttatatcactttgcttatttaggaaaagatatgccgtggggctgtgctttccaaatagatgaggctttacaatagaattctctgaggagcgttaaaagtaatttaaacatatttaattaagctgatcaacttatgaaaactgatttttaggcttgacattaataagacaattacaagtaaaagacaaataaataaatacataagtgagctactaattatcaacagttagatacacaaaaccccaacagtttggatagatacaatgtaccaaaagtgtgaatctgtgtattcagcagtaggttacaaacattatagaaagacaataaatgaaagccatggagtataatgagatataacataactcttaaattgtgctatatttgatgttagtagtataacaataattttgctcagggattaaaaaaaaactatgtctcacttatgtgaaaattcaacaatttttttatggataattttatttttttacttttaaataaccctttttcatttattttacataccaacctgtttctcctctgtcccctcctcctatttcccctttcccatctaacgccctccccatacactcctcctccgtctccattcagaaaggcacaggcctcccatgggctttcacaaagcatggcacatcaagttaaggcaggaccaagctcctcccctcacattgaggtggggccaggtaatccagcatggggaagtattgggggtctctggagagaccccctggatggaagtcagagagggtagagtctgatgttcaccagtcctgcagcctccctgaatctgggagacaatcagatgcaacagggagtgaagtcaagcaagatcttatttattgtttaacagcaaatccctcttaaagtaaaacaaacaaacaaacaaaaaaacaacccaaaaacacaagacaggaaaagtattacccagtaattttaaaggtattcctattacgtatctagtatcctatcccattttgggcatggtctgctagtgtgatgaccttatctgttgtgagtttgggcagccaattgtttatcttagtaaacacttgaagcctcatcttcgtagcttcttcacagtaccatcttgtaatggcatgggtcatcagctttgggccactcactcttttgttggaacatgatctgtgatctccacagggaacaggttaccaaagccaaagtcctagggagcagctaagtgtctcactgttagaagccttattaagagaccaagctacaggattgtcaattgtcacatacatgcagagagcttaggtcaatcccatagaggcttcctgactgttggacaagcattcatgagctcctgtgagcccgggtcccctaactatatgtgttccctgatcatgaacccattggctggtacaatccctcctccatttcttcctcaagactctaggagctcaacacagtgctgtctgtgaatctctgcctccatcagttactgggtggagtatctgatgacaattagagaagtcaccaatctgcttccttgatacagcccagtgtgtcttggaatcagaaaatcccagcccataggccacagtgtgtctagcacacttctccattttaacaggaacccttcagtactgtcttgttttgtaggttcagcagtcactttcttgtgggtcctgcatgtccagtttatagagcaacaaacagtccaggcaagagcagtttcttgcccaaatggctaatcttgccatgttgcaagcaaactccataagaagtttcttcaatgtctatcctcctttctgacataattggtgtgccaggagcagttgtgtcttactgccaagaaaaaccctaaaccatttaaatgccatatttctgtaggtctttgaaaggtttgaagaataccaatccatttaaatacatttctgtatatctagaaaacctaactaacctaattataagttctgactattataggtaaaagatctgtataaacacaatatctaaacaagaggagacatatacatatcacaaaattgaacttaaagttgtatcaataaatgaaaattcataccaatgcaaagtattcattcctatatcctattccccattttctttctttaaaaagagattcactatgctcattatcatttataaccaaccacatttaaatgaaaacaaacatttataaacaatatttgggaatttgggcatcgttctttctaaacttcttcctgctgattgggggcaatgttcataaaccatggggatcatgataaaacatagaaatctgaccaagtccttgtttttgtagtctgaaaggctgtatcatctcagcttttttggatgtaggatcagttgggtcactgcttcagagggtcttgcttgatcaaaccatattagtctggaaggaatcaacagcttttgattttctgtggaaatacaagcaaacactttatttccaagtagcctgtacttagacttaaattttgaagtcaaatcatgtttaaaatgtataagttggattaatttagcagcatttatacaaatgtattttaacagcagtgagtctttcctcggcaatcaaacaacttaaagacaacaatatggcattttccatctttatgaggcttttttattactttaattttacttttttttgtttcttttttccctgagacagggtttctctgtggaaatccacctgcctctgcttcctttagcaaatccttactggcgtgcgccaccacaaccggctactctatttcctcctgttatttttctctcttacaaacctacatatatttttaaatgcagtgtaaacctttagaggtttttctttatgtggatctgtctttatcatcttgggagtgcggagtctgaaccccaagagggctgggatggcttgaatgtatggaagctgctcccgtgactctcaggggccctacagggcaggttgtggctgcaggtttccctctttctctgggaaccttgggggatgggatcatcctgctcactgacaccattctgttacgataaatctttctgccaaatctacctgagccctaccaccatgtgtgcgctttatgccagctgcccacccgagttaaggcccaaattaatgcatagaaacttgtcttttcctttcttggatctttcctgcaaggtgtacaccctctcataatcgttattctcctatggttgcctttcccagtatgtgtacatcacaagcaaacatttctctgctgtttatgtttgagtcccacacagccaatgaagacatgcctgacagcaatccctggactccccagaaagaaaatgggccacacttccttgactgcactggatccaacttgctccatttcaatgacactcctgccagagtttcgggtactgacttcaatcaagttgaggatttcaagcgagatcttcaatcaagcaaatcccatctaacatggattggatacaattcattcaagacttttactatacaaaaattttcttcctacagaccccacaaggatgtcattgtcccatttcagcaggaagtaacttggagaatgctactcccccttccccccattgctgttacttaggatagtgtatatacctagttagggatagcttcctactgcttatggttgggattggaaggaggtgttcaggcttgcacacctctttcagatgacattagggtttagttaaaatagataattaggatgtgacataagcagttgttgtgtcttcttatatttcacctttgtaattgttaattttggatattttacactgttaagttttaatcttcttttagactaaaaggggaattgtaggggaagttgcccacttaggggcttaggggtatgcctgaccacgcctaagggcatggtcatggtgatgtagagtgagagtttcaggtggctgggtttcacttttggtttcacttttcagcttgctgtacagactgctgccgtgccggctggctaggtcactctgtaagtaaggcttttccctattaaatacccttatatttctacttggctccatattggtaatttcccactttataggtgtgtgtgtgtgtgtgtgtgtgtgtgtgtgtgtgtgtgtgtgtacagagagagagagagagagagagagagagaggagagggggcagtttacttatattgattccagagacatttgtatatccatctgttataaaatgataattttatgtattatttttaaacatggaaataaatgcattattcattcattcccccactctaccatccttagaggtaaaactttctgtaacatgacactccatgcaacatttgtggtttttttttttttttttttttttttttttttttttttacaggactttttaaggttctaaagtccaaagtgttggcacagtctacttgccattgaacacctataaacattatgcgtacctattttctgtctgtagcacatatctcctatcatattccatagtgtattcacttgctaaaattgtttatttgtattggcttcacttattggctttgtcttcaaaaataatcaaagatgaatgtaataaagattgtatataacatgcctgtaatgtgtgtgagattgtttttatgttttataattccaatgagcattaagaattctgacacatgatctgaagaaatggctttgtgattaagagcacattacagttgcagagaatcagagtttgagtccattaacccagattgggctgctcacaactgcctgtaactcctgcctcacaggaatctatacttctgatctctacaggcagtgccactcatgggcatagacccacatagatttcataattaaaaatacaataaatcttaaaaagtaaaagctgctgtgaagatatgcaaaactggagacaggaagatgatataatgggccctgacaatagctgccattcattactaaaatgtcctcttacatattgttcagtaggaaagatagcaacttgtgattcctagaactcattaacaacaatattcagtaaaatgcactacaactatattttcctcactaggcagtggttcaagaaaacttggtatttcaaaggagagtgaaaaggagcaatttcatcatattcactgaagaaacagctctttgacagtttggctctgagtctttacttccaccagggagtttggtctcacttcctgatttggatacattttccaatttgctgcctatgtataaattggtatgatatttacttgacacactaattgattctgtttgtgtccatacattcagcaatagcctttatgttatttgcttctcctttgggcaatattcagttttataccaattgttgttttagtctaatatcaatgaacttcataaattttatattatttccccttataatttaatcatttaatgctaagaacttagttagcattaaagtaaccggatgggtgaggaggcagtaaggatctgggtgaattgcaggagtgaaaacgatgatcagagtatattgaatgaaaagggtctataaaaaataaatgaaaaaataattcttataaactatattagagagataaaagaaacaaatgaattaaaccaacagtatcttccacaaattttctgcatgaaaccaacctttcttttatctttgtttcatcttcttcccacaaaacttttaagaattataatctacacttctttttagctttctcctgtctgtcttctgcgactctgtgaaagagtttttgaagtctattaatgacttcagaaatccaccgatcttgtgccctaactgcttctgatcttatcttaagtatttttcccatttgctatctccttcatgctatagtcagtttttcacattataacattggctctggattcctctattttcttccccacctttctggaaaaaaataaaagatctatttcaatagatgccttgtattcatttactatcttaaaaatggagtggaagctttgtaagcatttgtcttcatcatgttggcaatctcatgggctcagcaatttctgttctataaacaaaatccaagtaatgatcacaaatattctatgggctgagtataccattctgcatccagtctcttgttcaatgccactttgacttgctatgaacatgctacctgtattctccgcttccaggctggttttctttgtgtcttatagtaattcacttagctgtgaggatgagaaggctctcccagccctcttcacactaacctcgcccaggcttcccagttgtagtcttgttaatactcttcttctacacatttccaccatccaatctgtgattattcacagcccactcctcagctgatttgacaactctctttcttgtttgtgtctaggtacaccttttctctattacagaattgtgttattttatagaattttagtttcagggattttagttattagattctttcctatggtatattcacagtatacttctgcttgtgttgattttatggttaagaaatgcagccttttttattgtgaagggaataagaacaattttatctgttcattatgtccttcagttattagtcccaaatatttttcagaaactcttctgtctgttattttcttttctctgaagtattccaagtggcttttgttccctgaatctcacctcttagcccacctgttgtgctactcaaaatcaaaattaaatgttaaatgttacatcagtcaagaaattttctaaaagttgccacataaaatgagtctccttatcccttaaaacattatttaagctgggtgtaaactgtgtgtgtgtgtgtgtgtgtgtgtgtgtgtgtgtgtgtgtgatcttctcacacttcaacataacattctacttcatgcaatccttgatgtgtatcagaatatttcttacaaatagaaggtatttaagttttataaggaaaaagaatatttgcctgaatacaggcactgaacgtataaaatatctgatgatataataagccttaaatgttgtattacaataatatatgacttatctaaccaataatataactttaactttgaaatggaattgctaatgggctgagtaatttatccagtcagaccattcactgtaagtcctccacacttccagtacgtaaagacaccaagtcaaatgatgagactcatacctgaacctttcatttgtattctaggatcctcctgggatgttcatcagctgtacagcaaggtggtccatcctactataagcgtcactgatgccagatgctgtagatggaatgagttcccaaaagtgaatgaaatagatgcataactatggatagcatcaccttttctttcaatgccagctttgaattagtaaagagactacagactgtagactgtagatgtgtacttttcaggggagcttttctgagacacattcttgctgaggagtcacttttgtggcttttgttccaacaaacattcaataagaagcaagagcaaaaggccacatctgtgattttctgatggtgacaatggtacagtttgtgtgtaggcagatcaacatctgctctgaaaatgctaaagattcacctcacaaaggccaagccttcgatttccctctacaaagtgataattcatattgagagtgagtgttaagacacagtgattcttaaccatgaaaggcaccacagccactcaacaggcttgttaaaacccttcatgaaaaaaagcaagacaggaaacacgataaggtcattggtaggacacaagaacttgctttactagtaagcgcacagtggcatccacggtatgggtctggccatcgcagttgtagttcattccttgagtccctgtgtctactggggccacctagagaggttcaggattactacccctgttgtatgttgtccagaaacatcctttaaaaatggttgtggggagttttcagccaggtgactcagagttgaagggttaatctattgaacttgttttgactcattgattatttctgctagagaagagaatatgagtcttcagcattgtcagatgtgcaggtaacaactaagagaacaaggcaggatattgaagtgatccacctcaatactgcccttctacttatcttacatataagctatataaccttatattatagtaactttctgtaacaactattaacagtaaaagcacaccacagtcaccattttagtagaagctcatagaaacaaattcccttagggcagtgattctctttcctagaggatttccaaacaatgtagctttaggttttgagatcactgggaacatatcttgaaagtggactatgggacatctttcctttctggtttataaggaggtaacggttttttgccaccatgtactcctagcatgctatgttgcaatgccacaagccctaatcagtaaagacagctattagtatactcagactttaaaagctaatagccaaaacatacatttctctttagaaatgaattacctgatatgtgtgtaacagtagttgaaaacaaactggcacaatagaatagtggtagtttcattcaaactaaaaacagtgtgaatggcatgaataatgtgtatacatctaatgactattcacaaattagtcatgcatattcatacacacatttgataaatccatagatagatgaatacatagatgatagataatttctggagaaatgtatttttaatactgagaataatgcattatgtcagtgaagattgaggactctataactgtgacctccatgttgcaaacctaaattcagtgcccagtctactgtgatatcagctatttagcaccttgataatactaatgtgaatgcagtcagttaacatgtaaaaaaggttcaaaactctttcaggcaaatagaaattagtataaaagtgtttctaaatgagaaagtgtgcatatatacatatttttacaagatgcaatcacataccttcattatattctttgaaatttcaatttaattaaaacatattcttatttttctttttaaagagagctgaacacagccataagactgtatccctgcatacaggtgcttcactgagcacacagaaatggattaaaatttccattaatctggtaggtttttattttcttagttcagaatatgcatctgttggagtcaaattgtcaggaagaaggaaaagcaaaataaactcatgatttttctgagcctctgctcgtcatgaagagtaatcctgaaataatccctgcttctaccccaaaggaaagggaaagtttagagagctgctttcattatttttttcacatccatctttctatccttttttcaagtcgcagtcagacccctacactgaaatcccaaaatacatcaagaaagggagggctgatgtggggaataagtagagactctaaatcctcacatgtctcctcacttcaaaatccctttcgagacctccttacctctcagtcttctttagtcccttgaagaatttgccttcacagtctgaagaatgatattgatggaatagaaaaagtcttagggtagaattgaagtccagtctatatagccaaaaatactatatcagaagcaaaaccacttcatttctagctacaagccattttaatatatgtattttaggctagcagattagtgcaaatagtcatggattttgctttatgtttgatttccaactttgttttaaattttaccgcagccaactttggggtcaggaggttggaatttaattaatgtaatcattttatttatggagttgaaatggcttgtcagattagatttgttttttttttttattttctaagttttcttttttgagtcccatttctgtgactcctagatctaaattagttctttaatttaacattcagttcctggcgtagaactagggctttcactacattttgtaagccctagtggtgattagaataataagtgctcacagccccacccataacctctgccatttgaatgctagttcctgtgtttgtggtcctgtttggagaggcttaggagatgcagcctttctgaaggaagtatgtcactggggatgggtttggagagcttcaagacttgagcagttttgagttcattctctgcttcctgcttgtggtttgaaatgtgaccctcaagctgttcctgtctctagtccttagacctttctgccaggctacatgacagtgatagtgatgaattcttaattctctggaactgtatgtttcaaataaactgttctgtctataaattatattcatcgcgatgttttatagcaggaatagacactagacagcctttgaccaaagagctacaggcttcaggattcaagatttctccacaaggtttaccagtgtgtttcaatgcctttgccttccattcagttttgctttaggcatggctgaggctttgatttactggtctacatggatctcagttttctcttaggaagaaaaggtaaggtttgaactctgttacatattattgaagctgaataaagcaatctagagatcacaggtaagagaatttgcctagaatttttcttccttttgatcagggctaacctctagcaaagtcaagcccattggatggaggtacacaggaagtgtaatggctgaggtgctgggatgtgagcctatcaggagtatgttcaagagaatgagcctggatctttgcctttttttcttctatttattttggttaaattttgacctccaacttctgggtgattttgttattttaatattcagcactttgtgattttgttagaagatggcctttgaactacatggattattaacctggcatttacctttttaggagcaatagctgaaatgctctacttccttgggtatgtgggccctaaaataatgatcggaacatccaaatatgaaaccttgtagtgctgctttgtatatttatttttatttttcagaatcttattgtgacttattctgtagaggtcttgaagatctaggtgaagcacattctttcagatctcaccttgacatggcttagtgctttctgtattatttatttcatgtcactgtaactgaataggacagaaagggtgtaaggaaacatgtattttggctcacagttttggggagaattcaatcaatcctgctggggaaagtgactctgtgtctgctggtggaagactaatcctgttgcaatagttaagaggcagagaggaaaccaggtggatatgaccttcaagacccacagtactgatttctctaggcaggttttctcactttgtgaagactcaataactgtcaaaatagcaccataattggtggttaaatattcaaacattagattgtaggtataatacatcagtttcaaaccaaaggtactggccagttgtatcttaacttaatataaactatagttgtttctaaagaggaactctgaattgagaaagtatcccccactagattgggctatgagctaacctgtgagtgatgattaatatagaaaggtcaagcacactgtgggaactgccacccctgtcttatagttcttagtgctataagaaagcaggctgagtaagctaggagggagcaagacagtaagccttctttctccaaggttttttgcccccaggttcctagcttgagttaatgccctgatttgcttgaatgctagactacaagctgtaagatgaaagaaaccattttcttcccaagttgcttttggtcatgattttttatcacagcattagaaaccctaagacagcatattactgccatgtccaacttgcttccctcctgcttatcattcttccctaaatcaagtccttaataaggcattaggatctacagctttgtggcagtggattcttattactctactcaatacagaaaggggtaaaaagacaagcaactgggaagagattgatgatatcttcatatgcaattgactgataataattagaagtgttgtaaagcatagtaacacagtaatttctaaatggtatgtatcagagagaacatgcttatattatgcacccaataggcttcagtcagcagatcctgaaaaacaaaaatgtaaactttaactactttttatgccttaagagctaagcctttgttgaactatatttactggatggagctttaaaggacatgaatgtctatggaactgacattgagaaagtgtattacagaacagctgagaagaaactgacaaaccccagtctagactttgagaagaaggggagggaggggagaaaaggaacaaaggttaaagtgaatttcactatataactgcctgacatgaaaaactaaattctttttaaagcatgttttgaaaagtcacacctgtagacatcggctggctacaatgtgaagttaggatgttttttgaagaaacttggaatgatcaaatcacattaaccaagccattaaccacctcagacacctagcgtctttgatgaggagaagagtggagatccataaagccagtgtcattaaaactgcaaaactcaacctttaagattactacaccatacagatcttcaaaacaactcaaagtttcatgtccttttcctcgaatgtgcacaacttctgtgaagtctatcgttgtctctctgttcttttagatgctacctataagtgagactccatatttaaatggtatttgtttttctgtgttttgtatgatttcatttaacatatttttccaattttatccatgatgccccatatgataggattttgcctagcaagccccagtaatctatttgtatctgacttccaagctctgagattacaggcgtgcacctacatgcctgactttatggttaactctttacatactaagttgtctcccaattgcccaaaagattttaataattttttccaatttatattgccaccagaagtgaaatcttcctggtttccatcttcttgagcccattttctatcatttgtcccttctgtaatgttattttttaatcttcttaatgattttgattttgaacattgctcatttgtctgttgggcattagtgttatcatttgagaaatatctactcactctatttgcccatgtcttttttggattattttctttgtataaaatcattttatttaacatcttactataagtcttgccagaataaaaaagcaagagaatggaactaacaatcaaataagaaagaagaaaacaccgactcctgacaaaaaaattttaaacagaaaagtctgaaagaatccaccaaaagttcttagaactgataaaaagttcataaaggttgcagagaataacatcaacaggcaatattgacagtatttatgcacactaaagctttctgagaaataaattaagaaaaaaaatctcatcagtgacacaaaatacttcagaacaaatttaattaagatgagatacctatttgtctaaaactatagaatattaattaaagaagtcataaaaacatatatgtaagtgcatggcctagaataatttatattgttaagaaagtagactgccaaaagtaatctataaatgcagtacaggccctatcaaaattttagtcattttcttcttgaaaatgttttcaaagagaattatgaatttacatgggaaaccaaaaattctgaataaataaggtagtaataagaaaaaggatcagagattaagacatgacaattctgtgttcaagctgtacttcatttactacaatataatgatagttaaaacaggaaattagcaaaaaacagttgcactatccaatggattataatagagtgctccgaaagaaaagaaggtttcttttttgtattttgttttaacttgtaaaatgtttgtttctaaattaaataaattaattaaaaaataaaaaattgtttacatgcaatgtatttgattatttttatttttttaccattcccctaacttctccaaagtcctccctaaattttatgatctctgtgtggtgtgtgtgtgtgtgtgtgtgtgcgtgtgtgtctgtctgtctctttaaaacgcacatacccacacaccatgaaaatgaaaacaaacaaaaaaaaaaaacagtaagaaggagaaggagaagaaaaacccttcaatcaaaataaaacagtaaaggaagaaaaagtctacacacaaaaatcttgtagtttgttttaagtcagtcagttcttccaaggccttgggcctgccctggagtgtgattgaaatacccagcgacactccttttgccatccccttagttaagtgtgacacccagtttctaattccctttctaagttctgggaccctgtctggattgaacccaggtaggttctgagatttctgctgtagtctctatgagttcatatgcacatcagtcctgttgggtctgggaaatactacttaacaaagtttctattataagaacccataatctattttattgggttaacaaaagaaattaacaaaaccaaaacagaaattctacattttctaaggaagatatccctgtcttccatctatattcatttgattttcaacaaagtttacatgaaaacatgatgttagaaaaatagtggatggaagggtagttgtggtcatgatgtaatatattagagaaaaatatttttttttacaaaatggaaaaaagaaaataagaaagaagacaacaagtgcccagtttaccttgcactatagattgagactgatttatttcagagcaaatatttttaaaagctatgatatgaatatagctaatgtctcaagaacaaaatgtagtttacatacatcctcataatgtaaacaagacggacatcactgtgtctactctcttccgtgaccaagctggatttgcttagttcatagtaaatatttcctctccttgagtaagtgatttcccagtagaaaaaaaattactggcttcctaagattgacctctgataacctggctaaaatcccaagaagaaagacattttgattatatcatactgtgttttaaataaataatgcatttttaagataatacgaaaaatagaatagaagaaaaaaaaactcagaaatttctaaccaaatacaaactgtcttgaagcattttctgccaggatttttgacttgggaagattttggtatgctttccaccctgtctccctgtatcttcccatcttcccccctttctaatggctctgggagcaacatgaattttcctccatataaatcatccccattaaatggctggattatgttgatgaattcagcttgaagtagatttacaaagtgtcagaaagttagaattctcaatttattctagcaggatgcatcatgctctaggagcagttttatgaggcagtaattgggcagtcattctacactctgatagccccaggagattcaattctactacaagaaaagacattaagaaagcatagtcctttttttattattaaaagcacaccatgaataacaggacatttattttacactttttttcttttaattctaaccctaatacttgggacttttttgtcttttaaaaaaaatattgttcaagcatcaagtactgactcactaaagggtagtcaggaaaatgtcgagcactgttgctccagctaagctctgcacatcactgatgaccgctctgatgacttctttattcaggcccggaagtcagatttgcttctttgtaaagaaactacaggactgacagcacacaatgaatcatgcctaacaacatgctgacaagctggcaagaggcagcctgcttggtgacgaatacaactgacaacaagtgtacacatctgtttggtaggatttatgagagaggaatacaaacaaggaggagatgggctgtgggttatataagagaatttaaagacccttttctttctattcaaatagccacaacataaggaatacattattagtcctcaagatctgtttatgacaagcagaactagattctaaatggcctgtgccgattagcattttgattatcaaactgctgttccaaatgtctgatgaacagatattagaatagttcttaaacatactgattgaatgcacattgatgctgctatttttaacacttgcttatgttcaggtgtaaatctggttttgtgtctttccttaaagcttcaaggaaaaacataaaatatctgtagctccacagtttttctcagggaaatagcacccaaaacaccatttttaattcagtgatagaggttaaacagttaaatttgaaaaggaggtcaacagatccaaatttctataatcaggcattcaaagggctaatgatcagttttgttgtttcttacactatccttcacacttgtctagcagaaaggataagaaggtttgccttaactacaacccaacatggtccttttaaagaccatttttatttgagttttatacatttataaaacatgttcacaacaaatatatacctctactatcttccatctaactcccccatagcctcctgccaaatactacaattttaatgtactgaatccacttgatgttccctctatctgcatgggagtaggtccatccaatggggcatgggcagtgtaccccaggtaccatttctgaattaactgactcttactcagtccaccaggagctttgaactgccaattggcagatcatccttgtttctcacttccaggaaaaagagtcccacttaaaaatttgtaatcatagtaatgataccaagataacaacaacaacaaaaatgtaataaaaccctttgtccaacaatgagaaccagccctacccctagcttcacaaggcttacagaaacaacaggagaacccagcaccatagtttagctcatacaactggaaaaagtattgaaccctgcaggtgacctggttaaaaaaaatagaaattttgattttagaaagtctgacttgccaccttttggttctcaatctgagaaattttgacttataattatagatagtgattcctaattttcctcttattctggaatgactttaaagatagtcatttttttttccaaatactaaatgcttactgatgttttgttaaataaaatgaagtacagaagagtaagattggcttggcttagacattggatattttccctcccactcaagctcaagcataaaaactggaaactgtaactttccctgttcaagatggaacttcttcaatctcaggactcctagggaagggctcctttaaaaggcagagcaaactgaatatccagaatctagcaacagaggaccaagtcaccaccttagtcccacaccacttaaattccagtaattagcatcagatgactgaatattattctgaatactagatgatatgcaaatatgttatttaaaatttgggtgaaactgaccagctgagtccctaccagaactactgtatcctgttcttcttgactcttgcattggagaaagagaagccaagagttcttattacggggaacaaactgatagcaaagggggtattctttcttttcaagtatgaaatttcatattaatgttacctgcttagacagtttactgatctcatatttactcatatttgtatttcagaatattgagaatatacatttataattattcctttcataaaatttcatccagaatctgtgtgaagaaaattaaagaaatattccaatgtaaaaagtgagtatcataatgtcaaatatattgattggtgtctgctgtgttgttgaactagaaaattttatagcaaaaatagagttcagagataatttattcaagacccttcatctccctctttcatatttggcacatggttctacattccagttcattttgcttttattgagtgaatttcaaagtaatagtttatcaaatgtcatgtatttacataattagcataattgcatataagtgcataattagtgtaaatatatgtaattatattattatagcatgaaataatcttgtaaaaaaccttttttctaactttccatgccaaggcacacattgaacatgaatatgagttgagattttgtattcagtgtcttgttcatccttattgatttaaccaaatgtcaaatcttaatatgtatatttgaaagacagtcttcttttgctggactgttgcttcttcttcttcttcttcttcttcttcttcttcttcttcttcttcttcttcttcttcttcttcttctttggaaactagaaattctaaaaacaaatagaaatattttctttatattttctctagtctggtatataaataaaataatccttgaagtcaaataaaaaacatagatctatttgcaaacttcatgtggagataaataaatatcattttaaactcaatcccttggcaaataagagcaaatgaaaatgtcagcttccctcttctctatgctcaatatcccaatgctactgagaaagacactggtaattttaaattctagatcagtgataaagatgtgtaagcaagatgtgttagcagtaatgctaaaactagagtttaaacactataacttccctgatactcccattaagtaattctaagtatgctatgaaaattattttctagtttccccattctgtagaattattaccacatcaggcattcgtctttaaaattgaaatgtgaatctctcttcttaacaagacaaaagcatgtttttcatgtctaatatgttttaagattacacatataaattctttattatgaattgcttagtaatgatggtattatgatctgtgaagtatcattagatgacttcatcactgaatgagcattgtacagtgtgaactcacaagcccgtatgttgtagtacatatcagtacacttccctgtcccttgatgcaactaagatagagaatatttgaggagatacatttgtttaacttggcctaaagtgaatcaaaacatgtatttattgaaatatcatgtggcatcctatgaataacataatattcatgttgaatgtatcagctagtaataatttaaaggtatagaatatgcaaggaataaaatatttaggaataaatataactaaaacaaacaatatctccagacatgcaaggttaaaggaagtgaataataacttagacaaaatgttagtatacagatttatgacatattaagaaagaagaagtataagtgtattgctcattcaccacaaggcaccagataatgtctacaataagaaatctactggcagaaatataaccatatcatatggatataagaaggaaaaattgtggtggcattttgtttatgatctaacaagtaaagcttgccttaaaatcagagtgcaaagctagccacactagttagccatagaggccaggcagtggtggtacactttaatcccagcactcaaaagacagaggcagacagatctctgttagttccaggacaccctgggctacatgaaaatcatccagtctgaaagagaaacagtgttcacataaagataatcccagtacttcaagtgacacacctttaatcccagcactaagggggtggagaccagaaggatatggctgggcagagagaagattataaggtgcaagaatacaggaactcatggcagtctgaggcagcagtctgagtagcagttagtctgaagcactcagtctcaggaagcagtttgaggacaggattgcctgcctttgtctaggctttggtagaggtaagaactctctagtggatggctgctctggttctctgatctttcagccttcaccacctcatagctgactctgagtgtcagctaccaattagaattcgtgctacataacatcctgaagaaagatctaaaaccttgcatttcctcatcactgggaactaggaatatatttattcactgaaattttaaatactagatttttagtgatttatctaaatacttcagtacaaattatagatattataacaaattataaaacatgtagaaacacagtcaatataaacctaagaattaatttgtattggaaatatttaaccccattttgattaatttaaatttttggaattcaagttagctattcaatatatttacaaaattatttctaaactataagaatttctgggggaaaatgaaaaacatagcattagtaacaaataagagttggaatataaagataggaaatctcactggaagaaagaagcaaaaaacaatgttatccttatctggtctcctaccctcatataattggcagacaaacaactctattacagacaataaaataccaaacatttgtgtagaattttggtttcagttgaaaataagaccttccttactccacttccttttctgtctcaaaagattcagaatacagatcaagataggtgggcacatggtgccagacaaatgtatgcagtctttcctctgttgagccttttttttcccatagtctctcccccttttacagtagtttctatgtatcttgctctggtttcacagaaaaaaaatgaaacataaagaaaagaattcagtcaaaaggactctacaagaggtgatcaatcctaggagacttggaaagtagttgagaagtgtgatagaaagtagaaagtgggaacaaagggcttgctagcaaactgcagacaggcaaagttgtatcccactgggaaagtctaggatcctatacatcatctaccaagcccgccccccaccccccaaaaaaaaacaagaaggaaaatgcacatatgcatatatcaaccctgacatcagttgagatcctgttatttccaggtttcctttatgctggaccatacgagtttcatattaaatgttgtgtctttatacttattggtttatttacatacttacgtatgtgtgtgtgtgtgttttgtttattgatatatttctggatgtatttgtgtattatgtgagcatgatgtaagaaaatctcaggagatagttgtgtccttctacgatgtccattcctaggattgaattcagaaacagcatgtctttaccctctgaagcatctggctatcccctgtaaacaatttttttctatctgtttttaaaaagttttgtcattattctttaaatatatctctcccttttctttcctctttcaaaatcatcccatacatctctacccaatctcctttcaaattcatggtctcttttttcattactatttaatatctatatatatatatatatatatatatatatatatatatatgtatatccataaatacaacctgttcgatccatatagtgttacctgtatgcatgttttcaggcatgacaatttggcagtgaaaaaccaattgatattctcctctccagggaagagcacctctccctctcgaaattttcctcagttgcccatagttttgtgtaaagttgaggtttcacaggcttttctctgttccttttagtatattcattggtgtcatctttgtttggagggttgtggaattcagttccaatggatacaactacaaaacattgctcttcctgagactcagggaacattgcaaaagagggggcagaatgactatgagagccagaggatcagggagtttgctgtgaggttgtgtctcattgtaatagcagaggtcgcaatcataaacaattgttaaattaaggttttcttgcacacttgccactttctgaccaaaaatcagagttgcatgtatcacagatgtcaatttagttgtttagaggtcaatagcaaagcattcctctaagctgctcatggagaacaacaggggatctgtctcaatgaccaagctagccagcttggagaccaagctagccagcttgacttctttcatctttagcatctagataaaataaaacttgattgtgtaagataatgagttatattaaaccccataaactaattttgctctttctcactcatgtttttaatcatgttatcagttaattacttcctcattgaattatttcaacaaactgacactgatttctttcaagatttttgttccaattattttcatgatatgatgtttctacctctccatatactggaattccccactgtatacctatcccacaggaattagagtattaagagcatgcttctggaatcacacctggctcacaatgcccttactgatatcacaatctttgtcatagcattttatttctaagtctcattttcccctcctggaaattaaaaatgtttataattatcttgcaagatttttgaatgttggaactaatacatgtaacttgttgttctttggggagctcgttaaacaagggttaggttatattaacactaggaatagatgatcacaccaaaccctttacagcattgtgccctcatacacatctagatgctgctccattttcttatgcactatagatttcaactaccctagactagactgctattcatgatttgaacttgttctatcccaaatccggtctggtttgtatctctaaaatgccctagaaaactattattcagacttaaagagctagctaaaataacatgccttttctgaactattttctcagtcttccagacaattaatcgctagttggtctattgtcatctgattagtaaaatgacatttttgtacatttaaaatcattttatgtgtatctcactgatcagactagctttcttatgttaagaagaaaatgtcactgaattttctttcgctgggttcaggtatattgtcttcaacaacaaaagtcaattgggtaaagagataaaatagacaggtggaaggatgacccaatagataatattcctcctaccatgaaccatatagttttaataactataaacagtgtttcttctgtcatatagtaacatagggaatgagtattgatatcgctaaagcgggattttgatgtaaaatatagacttttcagcatggcaggttatatatgaagtattttttaaaatatgaatatgaggagctggcttagattcatctgtgaaattaacttgcacttccaaatatgtcaaattattcagtgattgccaagatcacacttagtaacatgccctatagtcaagattatggagtcttataacattcatccccctggagccaatgagcactgcaatgaaccattggagcattcagaaagagggtggcataagggcaatgctaattacttcataatctaaccaaggatgtataaatacaaccaagctaagatctcatgtatatgaaagtctgaaagtattgacctttatcacatcagaaagtagagaaaacagtactcttccccgcttaggtatagacttctaatgacctttctacagtgaccaggctaataacatcttgtgagaagaaccagcttttggtgaacaaaacatagaaatgcttagaagtaccaatagaaaagctggaagctgttaatgtaaatgcggcattacaaaaaatgctcttgagtattttcatagagtaggttagcttgatggagcctttgttgattagatcatcgaatacacagaatttagctatcatcagctccctgcagctaaagttgaagaataaacttcactgaacacttgtgaaaaaaagattcatttgtgtttagatgttaagttgtttaaagcaaaaattcgaaacacttcttgtcctgagaatcatttatattacacataaagcaacaatttgaaaacaatccatttataatacaaaagtgccatcagcacagggattgtgatctggagtgatataaagactttctcacacaatgggagctattttggttttatttcctcagttactttgacatactaatattggttaatttactgttggatgtggaactttatgtgtacatctgaatcttgttctttaagagtcaagtagcttacaaggatggaaaattctgcctctgcagaaaataggaggtaagatttctttaagagaaatattgtaaagggaaattgattctttgtttaaattaaatttttattgtaatttttatctaaattagaaacaatcttatatctttatacatggaatgctctaaattctgtgggaactcctttgaccataaaatcaggtaggtgcagctggggtagaattacatacaactggcagggaggcacaggctagagtggctgaagtctcaggtttgaagtcaagttagatgttgctactcatcccatggttctagaaagctcttatactcaagaggatggcatcctaggatacacatttcaataataaaataaataagttctaaaagaatgtatcccagcctgtgggagtaggaagtagcaggatagccatgaattctaggtcatctttggtgtacatagtatcaggccaaccagaccatataggaagatccagtatgaaaaacaaaacaaaacaaaaaaacatgcccccccccagaaaatgtcaactatgagtcatccttgtttctagcttctttaatgggaagtacaagaggtgtttttgagacctcaagatgggctggagcccgtatatggcagagtcctggcaacaaccaaaatggactttggtgttaagttgagactttctggtatgtctgtatgatggtttgatcaggaatggcctccattggctcataattgaatgtttggtcattagagaggcattaccaggaggtgtggccttttcagagtaggtttgggcttcttagacaaactgagttacaagagttgcctaggccttgccccaaatgacttgacagattttgatgggagggagaaggaaattaaatcttttctaatttaaataaatatataaaatcatttctattaaaataaaatgtatagatttgtttccaatttaaataaaatttatgaagaaaaaaataaattagaaacaatcttgttttacatatcaatcccagctccctctccatgccccccactgacccccccttccatgctctttctggtccccagggatggtgagttcttccacagggggatcatcaaagtctgtcacataatttgggtcagagcctaggccctcccccatgtgtctaggctgagagagtatccctctttggggaatgggtttccgaagtccattagtacaatagggataaatactgatctgctgccagaggccccatagacggcccaggtctcttaactgacacccatgtttgggggacttggttctgtcctatgctggtttctcagctgtcagtttggggtccattagctcccccttgttcaggtcagatgtttctgtgggtttcctcagcctggtcttgacccctttgctcatctctcctccctctctgcaactggatttcaggagttcagctcagtacttagctgtgagtacctgcttctgcttccatcagctactggttgaaggctctaggatggcaaataaggttgtcatcaatctcattataagggaggggcatttaaggtagccactccattattgcttagattcttagttggggtcatctttgtagatgtctggacattttccaagtaccagatttttatttaaacctataatggctccctctatcaaggtatttcttttcttgctctcctttaatttttatttaaattaaaaacaatcttattttaaataccaatcccagtttcctctttctcttgtctgcccatttcccccaccaacctccatcccatctccccatccactcctcagagagggtgaggcctcccatgggggatcatcaaagtctgtctcatcacttggaggaggatctaggccctcccctgtgtatctaggctgagagggaatgggcttccaaagtccattcattcacttccataatacaataaaagttttctgtaattgtgcataaatatttttaaaacattacagaattcacattaataatttaagtctgagaataatcacatttaactgttaagtaaatttttagattctgctaccaaagttaggtcagagattttgactctaattttcttcctttgaattaatgattgacttaaaatagattgtttcaatctttaaaatggctgaataaaaatgttttttctcatctccacatagctacataatgtcatatatagcagtatatgtctactagcagtagaggcatatacaattaacacataattttgcatgtttgttcgtttgttttttccaagacagggggtttctctgtggctttggaggctgtcctggaactaggtatagtatagaccaggttggtcttgaactcacagagatctgcctgcctctgactcccgagtgcttggattaaaggtgtgaaccacaaacgcctgcccctagcagactgtttttaaggataatgttagtacaatgctatagatgacatacaaaaaagaagaagaagccttaaatagttctggaagattcattccatggaggaggatatttcttagctgagtcaggagcaaatgagtttaatagattaaaaagcaataaagaatatctggccatagtgacctatgcctatattctacacttcagtggctgtgatgtaaagactctgagttcaaggaatccgcagatgtattttgagacaatatcaaaacaaataaactgtttatgaacagcaagcatggtaatctaccaatcagttgtttaccagaaagcaggtattcgctaaatactagcaaaagtgtaagataaacatttcaaatgatgttgttatgtatccagtatgcaagaaggtaagatttaatgattgtaataagaactctgacagcattatgcatagggaactgaaagaagaggcatttgtctcactaccaggtggtatggagaggagatgacctatgtttccttaaagaaaacatattttttttctatttcagtgttgtctgagtccacatactatagatgattttctttttagttctgtgagacatcttccaaaatgacaaaaaggatggtctctatagtggaagctgtttcagaaactggagattctcaagatctgacacataggctttgtctcatttggtattagtgtagaacagcctgggtatgagcaagggatttgagactacttttcaaaatgttaaagtttctacccataagggatatcaaatagatttattgtttataagtatgcctctatttatatgcaattcttttgtataaaaccaaaatgatagaatatgtcctattctttttatttttattaaaatatttatctctaatcaaagtagctactaatttagaattgtagtaaaatcttactgtagttgaatgtttttgtctgtcctgctcatccccctggacaagtttatctccctctcacaggtcccaatgccacttattaaataatcactcagaagctaatattaaatataagattgtttggtcaatggttcaggcttattactggctatccctttcttataaattaaccggttttttaacaatctgtttattaccacatgggaatggcacaccactaatgttctgacatcttaaccattctgtggctacatggcatctctccaacttcctttctctatctttctttctctctctatctgtttggatttctctcatggctatattctgcttggtcattggccaaatcagctttattcaccaaccaataaaagcaacacagatttgcagcacacagaaggacttcccatatcatcttaccttgaagttaaacaatcaagtatgatagttgtaaaatatatacaaagactacgatatgcttgaaatttaagatttgactgtcaactaaatacagcctagcattgtctaagaaggcaatctcagtttagggattgtctgaatcagattggcttctggacacatatgtgagagagttagtttgatttttaattgatgtaggcagatgccatattagaggggaccattccctgggtatgtgtgtctgggttgtattagaaaatcagctatgcctgggtctgcaaagaagtgaccaagtagtgtccctctttggtttctgcttcaagttcctgcattaacttctcttaacaatggatgataacctgtaatccaaaataaatcctaaattgtttttagtcagagtgctttatcccagcaacaaaaaggaaagtataaaaacttaaatgtagaaagaaatatgtgaatgaaaagacttatacatcagtttactggtataataatcattaggttgggaatatttgttatggcatctttgaataattttgtcagcatgtaactgtgtactgggccaacaaagttacacattgaaagaataaaagatatatttatgacaaatgaattccctattaactaatgggagaattacaaagtgaaattctatcaaaattctggagtattgcaaaagcagtctggtaaagggacatagctgtaattttcatgaatacagtattattaatgaatcaattgtttaaggccaatattctaatatacaaattagtgtgaacatcgataatgagcagtagacaattgtgtgtgtcttttctcctttttctgctttgatatttgtaaaaaaaaaaatggtgacattactttttcatggaaagtattcaatttgaatcctattatactaatattagctgattgcatcagtacccatgcctatgttttatttaataccatgacacttgagaagacatgtacaagtgttgaacagattcatcttctggggctggggggggagaagacatgattaaattgggagagagaggggaatctacatatgatcttcaaaggtcaagttgagtctttcatctttcttcatgaattcaactttcaacagcccaaacactctaatttgctaagagcagatatgaataatcatgtcaaatgacaatctcaggcacagcaaagaaaaaaatccatcctgtaggtctatttttgcattggaagaaagattatgagtggacttatgaagaaaccccaacattctgtctgtccatttatgtgcaacagctaacatttatttatccttcaacattatagattatataatattctaatttgagtagagaaaatgggtatattatagaagcagtagtagagtatgtctgagattcagtacaaatgaatttttttattccattagaatcaaaggtgaataaaacaccatggagtaattcttggacattttcctctccacctctacctgaagacataatctacaaggactgggttcactaccttcactgctcagccttgaactgtactgtaagtagtttttagcaaggaataattctaagaatcatgagtagcttgccccatatttctgacaaggtaatgaacttaccttacatagtgtctgctcttccaggacacagcctttcttttttacagtgctggtcagttttcaatcactgtgaaaaatgtttcacacacatacagacagctttaacagatcactatagctacttcatccacaagtgataataaaacattaagatgctattcagtacataaatttcaatagtgattggcttccttgatgtaaaaaccgagtctccgactatagagcttcccacaatgctctgttttcacagaattcttgcttgtttgtttttgatgtctggggtgatatccatctcctttagcttcatcctttggcatggtcctcattcctaatatgtaaactcgggcgtttcattttccctctgcaattgatttatgatttgccattatgactttatttactttaccattgtccttacctaatcattttaatacacaaatctcatgtaagcagatctgaaagtagatattttcaacattacagggtctagaattacctaggaaataagcttcttgtgtgactataaggaatttgtagggtaaagactttgaaataagaataccaacttaactatgattaacacctttccttgtgccagagatatgaactaatgtgagagagagagagagagagagagagagagagagagagagagaaatcaaactgagcactatcatccattatcctttgctttttgactgcagtcataatgctcacaaatgctttattcctactgtagtgatggagttaaggaaaagagtcaaaatacacccttcctccattatgtgacttctgagcagtatattaatcatagcaatggggaaaagaactaatactaagtgattattgaaccagtatattgattattcaccagtttagaacaagctagtattaataaataaccaattataaaatatacttgatataaaatataaagactcaatataacatatgacttctttgttccagcttcttaacatctatgtaaatctgtgacaagaaaatagtaaggccaatgactattctcctttatatctgcccaatgtgagtacctgaaataataaccattttttgctaacttgtagattttgatgatgtaagaaatatcacaaggtaagaattagtagtttacaataagtgagcagaaagactaaataagtatagatatattaacaagttgatgatgaacattaggaagaaaatccattcaacagttttggtgatgttcatgactttcacctgtatggaagattttcctgtcttttattgcttccctgacacactttactcttcttgatccactgaataattatcaaaaatcctttgcttaattaagtttttgtttctgactgagtgtttacctcttttaagcaaatacacctaaacaaaacaattctgaatatttaagttaatagtaattttggcacataaacacatatgtactatgtttgcttatctgtatgcatgtgtgtatgtgtttgctgtgcatgtgtgtagacatatttgtatatggaggcgagaatgttatattgaatgtctactttgataattctctaccttgtacattgaggcagggtctctcattgaacccaggatatggtcatttggctagtctaggtaaccagcttgctctggagaatcctctaactcagatgcctgaatattggaattataggctagccaccatacccaactggcatctatgtggtccacaaatttcatgtcctgtgtaactgaaatcaaaggttttgcttctttctggcagctgtgattttatgtctctttctcaaacaagagtagctcctgttgtcttagccactagggaaaaatccataaatttcatgaattggttaatatatatttatgatggccatccttggatcacaaaataacatattataatatccaatacagtgtgtcttgacaaaaatgattacgtttgtgaaaaaattaaataatggctatgaaacaatatcctgactaaaactaatacaaataatactattagtgtgaaaaattatatcaggctaaataatggatgaagacttcatgtgtcactatatcccatcccccaactccagcaggtatgaacaactaaaccataaaaacaaaacaaaacaaccaaacaaacaaacaaaaaacatgtaggctgtccacagacctcccctctttctctattaccccagatctaatctctctagcactgcaacagaacaccaccttcagccttccttccccctgctcatatcacctctggatcccacaggctaccctcttccaaattgccttccccctcttgttgctttgttccagaccccgcaagcacccactgcttcccaaagggctgctcctctaaacaacaagtaagctgaagaccacaccactcctgtggcttctgagatacaatttgcccagtctcattcccagatctgtagctggaaaccttctggggtctccctttattctctgaccctatccccaagggatcactaaagaccttctctcctactgttcttctgcaactcattttagtatcccagccggcaacaccagcaggcattctctgtggacataccagttgaacatggcagaaacccaggcaaaccaaagccccaaaattttctaaaaatccaaaaggaaacagaaaccaaggaacaaatcacccagacaacagagacaaattcagaaatcagcaactagacttataatcatcccaaatccaaatgcctaggtgtcagtgtaaaatcacagtcaatgataggaagggcaatatgccccacagtaaccatatctattgcagccttattcttaacagccaacagctagaagcaacctaggtgtccttaaacaaaaaaaaaagtataaagaaaatgttgtatatttaaacaatgagatattactcagctgttaagatgaaatcatgaaatttgcaggcaaatggatagaagtagaaataaaatcattctcagtgaagaaatccagatccagaaagataaatatgctatgtattcacttataaggccatattagctgtgaagtaaatgataaccatgctactgaaagacccctgccccttagccctttctttctcaagtttgtctcctcctcctcctgtcggcagcttccccgatccccaccccccgccggcctccacttcccccgctgccccttagcccgcccggcctgagaacaagcaccaggtgggccggcctggagccctgcccctgagcccccgcccgatgagaaacactccgtcccaaggtctctgcccccaaggtcagccatcaggaagcggagggggggaattgagtctgttgtaccagacaccagaccttgagaatatgctgatctggaatggctctatgtctcatttgaaccatccaatagaaatgattctgcatttcgcctcatttgaaagactctgtgtttcacctcatttgaataactctgtactgcgcctcatttgaataaccctgtatagcgcctcatttacattgaccaatgggaatagctctgtacaatgcctcattagaattatccaatagaatccctgctcctagcttgcgcctttttccctatataaggacccctttcccttggctcggcgcgcttggcctcacagaagctaagtcgcccaggtacccgtatctccaataaagcctcttgcggttttgcatccaagttcgtggtctcgctgattcctgggtgggggtctccttctacgaaagtacctctttgggggtctttcactacaatccataaacttctttacttaggtaaagaagaatggtctgggactggtggggaaagacaggtcagagatcgttctaggtgagagggatagaatcgattttatgggaagactgggggcagatggggaatggaaccagaagggtggatcaggtaggtacaaagaagaggggagggagagagtacagagaaagagagggctgcatttggggaaatttgagggacggtgtggaaacctaatgcagtggaaacttctagaacctgtgaaggtgagcataaagaagactcctagtaatggggtagaagcagtttcacctggtcatttctcatagcaagtggtgggatcaggttacaatcaattgagttgttggccaaggggttcctatgaaagtctccaaacaacagaggctgttgcgaaagcaagtgccttttctctgcaaaaatgacatagtgaccccaaatctgaagaatacacccacacaatacactgaacatggagaagtcaaactagtgcctccatgtagccctcacccctacattccagtgtgtttactgtgggaaggtaatgcaggctgcagaaagagaaatgtggacaacaaccctgtcacaaaacctttgacttaaaatgtgttctgcctgaaaaatttactaggtcaacgatggcacaacttgtgggagtagccaaccaatatttatttgacctaagacccactccaggagaaggaagccatactgagagactagataacccaaagacctctgataacgttaaacattactggtcaataaaagtatcaataaaatgacttctcatattattttgctctactcatagatcagcgcctaacttagtcatcatcagagagccttcctcaaacagcaaatatgaatagatgcagaaaacaacagccagatattatgcagagagagagagagagagtctaaactgaaggcctcatgaaatccctctccctcaggcctcagataatcccatggaaaaggtgggtgcaaatttttatagacactttggaaatcaatatggtggtttttcagaaaattgagaatcaagacacagctgtaccactcttgggcatatactcaaaagatgctcaaacataccacaaaacacttgctcacttaactatattcataaaagttttattaataatagccagaacctggaaacaacagagatactcttcaatagaaggatggataaaataatatttacatttacacaatggagtattactcagctgttaaaaaacaataacatcaggaaatttgaaagcaaatagatggaacaaaaaaataattatgagtgaggtaacccagacccaggaagacaaacatggtatgtactcactaataagtggatattagctgtaaaggattattatgctacgatccacagacccagagagactaggtaagaaggagagctcatgggggatgcttggttctaccagagaaggggaaataggtttgaagggtggactgggggtggatggggatgtgaacatgagggatcatgttggggatgggtggagggggatattgctgaaagaaatgagtggaagaggtggttgggggctcatttcagagtcatgtgaaaacctggtgcaaggaaaactcccagggatctataagatgaccccagctaatactcctagcagtagtggatagctacctaatctcctgtgaccaggtaaggcttccagtggaaggactgggacaccaaccaagcctcataacctttgacctatagtctgtcctaccaatgggatgtgctggggtaaaggtggtacagagattatgggaatggccatccaatgactaatccagcctgaggccaatgccatgagtgtaagctcacctctgacactggctggagtctcaagacccagcagctgaatggcacagagatctaagatagaaccaaacatgattacagaaaaaaaatgtcaacatagtgatggctaacaatattgctatgctcacagattggtgcctgctccaattgtcatcagagaggcgtcactcagtaactgttggaaatagatacagtgacccacaaacaaacattaggcagagctcaggaaatcctgctgaagagagggaataaggattatattagccagacaggtcatggatatcacaagaaaacccactgaatcatcattcatagaagctcacagagtctgagccaacaaccaggaagccaaaatgagactgacctaggccatctacatgtatgtgacaattgtatagcttggtctatttgtgggactcctaacagtagttgtagatgctgttcctaaccctttagttggcttttgggaacctattcctcataatgggttaccttgtccaaacttaatacaaggggaggtgcttagtacttccacaattgatatgccatgttttgttgatatccatggaaggcctgtccatttcagaataaaaacagaggaggagtggatggggggacacagaaggcagagggaaggtaggaagagggaatgagaagagaggaaggaggggaaactgtggtctgattgtaaaataaaattaattaattaattaattattaataaaaagattgttagagccagaatggatagaaagcatcagaacaaggtcctctgaatcaaccaagaaaggcagatatgagcttacatagactgaagctggcctacatgggtctgcaccacatcgtctgctactagcttaagcttagcatctttatgtgattcctgactgtgagaatgattttgtctttgacttttgtgcctgcctgtgatagggacatttttgatcctgttggattgctctgtccaacttcattataatagttttagctttgtcttattacattttattttgtcagcttggttcttatctctgagaagcctgttattttccaatgagagacagaaacagtgaatctagaggagaagggaggggaggggtagggaggttgggaggagtagaggaaagagaaactataattaggatatggtgaatgagaaaataatctactttcaatagaagaaaaaatggatcaagaaagtagattactttgacatgaaggaagaaagaggggccaacactgacaagacataacatgaaggaatgttatattggtaaggaatgaattattatttaatacacatttgtcagactcataaagttacatgtgtagtctatataatgttacttttatgtatggttcatggctgaccatttggtattgaataaatgatctatgtgctcttctctggagaagacaatgtcttcctctcttcttattcttaattgtctttaattctttgtgtagaggtgaggcactgttaacttaccccagttcatattagcatggctcttgctgttgttcttgttcagctcatgtttaagcagtcatgctgatgagaatttatgtgtgtagcttctgttttacttttctttattaatattattattattattattattattattattattattattattattggtttttggagacagggtttttgtgtgtagctttggagtctatcctggcactcactctgtagaccaggctggcctcaactcacagagatctgcctgccttctgagtgctgggatgaatggcatgagccaccaatgccccctcgtggcttctgattttcatattgatttattgagatagaacaccttacaaaatatcttaactttgatcattgaaacattctaaagtaatcacttcagagtaaaccctgtcaaagcattattagtcagagatgtaccaaagcaggtaagagtagtaatagtggtgttcaaatgccatcttcaatccctgcatatggtttacaatcattgtaagaattatcacattgcttctccatatctcagcaggaaattgtactggaagtctatatctaggctttaaaaataatgaataatcatgtttcctttatattttgtatgtagtaaatcattgactatatatggatgactggtcatggtgtgaaatagtcacatgatataataatataaaatttatagctttataagacaaaaatagctttcaaacctactttcctattttataacagctaaaaatgaggctgtatattcctccccagagtattcatgcatgacatcagtctttaggttattagtaccatatatcatcagcaattaagagtaacattttagggctatagagatgtcaaaatgggagtggcagtatggtcttggtactctaaaacactggatgcaatctgaccttcatgcttttgcaagcataagcagaaaacgacttggctggatttccccccaaaaatcttactcaatgattgttttatgtacatttccatttaagatgcagtgtttcatgtcatctaaatttctgagatgatgatggggtgaggaacatgttcacttctccagtcgtaaatgacctcagttcatgaaatgtaacaaaaaatgactggttgttctgttctctctttctccttctcagaccacccaggaagattactttaccagatttaatactcattatttcagtgctttcttaaaaccacctactcatgagatttttcttgtttgagctgtcccttcatggtcagtgtcagtctctaactttcataccctaagtgttctcttctgtttcttttgttgatcatgtggcaatcatccagggatttaaacaaatgtggatcaaaatattgatgggcattggtcacaatttaaaagtacttcctgatcctccggaggaattgggttaggttcccagcactgacattgggtaacttgcaactacctgcaattccagctccagagaatccaatgtgctcccttggtatctgctgatagaagaatacatgtggtatacctacacacagactcagtcacagacacataaataaaataaatctttggttctgaagacatggctcaacagttaacagctcttgctatgcttgagaaagacgcaatatccacacaacagcacacaactgcctgtaattctagttctagggaatttgacaccttttagacctacaaacatcaggcacacatgtggtaaacacacatacatgcaggcaaatcacccacacacataaaataaaaattataaaaccttgaaatatgaaaataatcacactcttgttaatcgtatgcaaacatttcatttatgttattccataaataataaagaatatcagatacttaaagtgtttacattatattattaaaatgtaaagattacttaagtcatggaatatgtgcctgggttacataaaaatatttcacaattttgtatgggattttactacctgtaaacgcagaaatccatggcagaacctggaatcaggcaccaatgaggctgcacaggggattaggagacataagaattacttttatttgaatcagtgttgataaaatcatactctttagagctccatgggcctgggtatcttagcatgctttaagcgtgagaaggatgatttgggtggctttggactataaatcataatatagtcaaatttatatgaggaataaaatatacaaactccttgaatgtagaatggcatttgatatagctggtaggaagtggggaccaggcagttattgactgaggggtacaaaatttcagctggagagtaagaatgaattttctgatatctatctcataagcacatgattatattatataaaactgcactgtatcatttgattaaaagtagttaaaagatgggcttggagagatgactaaccagttaagaggacataatgattttgcagaggtcctgagttctgtttcctgagttcatgttagatagctcacaatctcctgtaactctagtgccaggggattgaaccctttcttcttgtctccttggtcactttcactaacacaaacacaaacacacacacacactctctctccctctctctccctctctctccctctctctctctctctctctctctctctctctctctctctctcacacacacacacacagagagagagagagagagggaagagagagagagattgaaaattttttaaatatacaaaataggcaaatgtctattcaaatatctcaccatgaaaacgaaggtgaaaaaaagctttattatccttacaatatatactcacatcatattgtaccctgtgatgtacttaattatgatgttctcataaaagatttaataaaactatgaaagatagccacactattgcccacacatctttttttttttttttttataacatttcatctcagaaagatttccaccagctgcagtctccagtgtggtaaaaaactcaaacatctagtgaagtaaattagcttttcaaaaatagtctttctcctatattagtcttacttggctattataaaaaaattaccacaggcttggtagttcaaagaagcacaatattttttcatagttctagaagcaaaaatccaaaatatgcttttttttttttttttggctaaagtcacagtgacagaagaacgggttctttctgcctcaacagaatcccgtctttgctcctccaaattcttgtgtcttattacattcagggtttatgtaaataatccagaacaatcttcccaattcaaagcatttaactcaatgacttctgtgtcactcatgaaatctagggtttgagattttgataaaggtcatgactaagcttgcaataaaacccaaagctaatgagtatcacagaatatgtcctggaatccattaatggagtgtgaagtggttgacagtggtaatagaaatggttgttagtgaaaattatacaaatgaaactttaggtatcttgccaggactagtaagaatgagttgtcccccaccctctaattttctgcttgcaattctcataacctccacaaggtttatgaacatgttaaatgttcaatcctcaagacatgtgcaataaatagcattcaatatgtcatgataatcctcactatcacatggaaaaaaatcaaagtacaatgaccaaatagctttcagaaaaatcacaaaccgaatggtaagcagactctaaattgaaacgtatttaacagttattctgtcaactgaacaatttctgaccttcactgctgcaggaactgaagatcttttagcaatatatggaagctattatttctaaatgtgaaaagacaaatttcccaactgtgataatgcaataatttttatataataaatgcttctgtcaataaagaaaatactatcccatggcaaataatagactaaagaacaactaaaagcttattatatttaatgtgcagattataacaaattaaaatttttctaagtggtcatttaataagtctttaagatataaatatatttgcttctattaatttctcatttgaaagtttataggtgtgactgagaaatatgaaaaccaaacatgatccttagaagagtaactgttgttcatatgaatagaagactaacatgctaataataatatgaacaaattttgactttgtgtaattttcttgtgtgttgttccaaactttggctttttcttattgattccttggatgttcctcctttacccctgcatttcctgtaaactgaaagttagatctaaagacaccattattctcaaattaaaccctttgtcaagaattctttatagtgatgtgtatatttgcatgtgtcactggaagtttcctccttcaagcatgacatcactaatcagttgactcagctgccaactgccagatctccactgtccaggcagactttagtgttgtggccaggtaggggcaggttgctgttttagggagactacaacatttcagccattcattatcatgacacttggtaagaattacttgaattatcactttacactggatttggaacaaaacttaaattttgttgttgttaacatctacttgtatacactataagaaacattacttcaaacagttttttctctgatctaaactacacaccttctgttttcctccttgactgctcttgtgaatcgtaaattcttaaacctatagcatcatttgtgttatcaaataccatcatatattacctttaaattattcaaatttctctgtgtaacaattccaagtctgtttctgtgatgtttgaaataattgcatttacatggggacccttccttattttttggcatgaataactatgtattcaatttttgtgcttggtgctctgttgtaaagggctttgcattggaagcattatcaaaataaactgttgttaggttttaaatacatacagtgtatctatactatgtcactgaaagctcttctatatggctatgatttcccaagtgagtatttgactttctacaatgcattgtttttgtttgtgttaatataccaaaataagatgtaaccagataatacaaaaactatcacaccgaagttggattggacaaaacaaaacaaagaaaagaaacccaacgaacagtacaataatgagagacccactcattctcatactcagtaatcccgtaacaacactagagtccataatatatacacagagacatttacaatgtattgttaacaaagtcaatcttcattctactgtggaagtgtctctcacatatttgcctcatctatggcccagatagcagcctcagttatattcttaaacagagatgcaccacatgtcatttttcagggaatgctgatgtaatttttctctgtttcagtcattttgtgtgtgactctgaagatctaacacagaactgagcatgttctaaacaagcactctaatcctgagctatcccactcttgacctatcacaaaggtttaggacagaattgtagaaacaattttctgtatggcccagcattcacatacatgtactttatatgttaatgttcatgaaacataaatatactctttgatatttctatgtttccataacttttcttgatttataaaaaatattttataatgcttacctaagatttattttaaaaactaaaatatatagaagatctacatttttctagcagggactggtacctaatctagaaaagaaaagggagtgtggagtttatagacagatataacatgtattgttgcgggatactggtttaagatatgttatatttgtttatgcttggaatattagtttaatgatgcaaagatgtgtttcattcttttatgttgcatttgtttaaccctgtaaagctatgttattttgatgtctagaacacctgattggtctaatgaagagttgaatagtaaatagcaagacaggagaaaagataggtaggtctggtatgcagaaagaaaaataggaggagaaatctaggctcaaaaaaaaggagaagagagagtagccagagaagaagtggataccaagggccagctaccctgccacacaaccagacacagagtaaaaaagaaagtaagacatacagctatatcagtaactcaaatggccatgtgctagtcatctacacagagtcccaatgctctgtgactttgacactggtactttggactgtatatgtttaaattgcagaactgggaacaatactgtgaatttcaaaagtgacagatgtatgtccaaggcatgtggcatggagtgaagagaaggaggaaataagatgaaaagtggaaacacagacagatttaattttttaatcagtaatttgttataaaaaaagaaacaaggaaaaggagaaaatatttatacctagacaaaccatagtaagactaaagaaacaataatgtattgacagttagataaaagtgaaggttacacagaaggaccagcagcaacaacagctactttgtcatcagatcatcatgtatgatggaagtcacaagcaatgtgtcaggaagtggaaggtcctgagatataaataagtccatctagataatatattcaacaaaactgtctatcagaaatgtagccaaaatgaatatatgagaataaaatttggtagctttacttttatgtagtattttcattgaaaaatgttaatgatggagttcagtttgctgtaccaaattttggcaacattaaaaatagacgtcactaaaatttaattttatttaaaaaataaagttctttttattatccatttttttatttaaattagaaacaagatttttttacaactcaatcccagttcccttactctcccctccatcccagccccggccccattaacagcctgcctatctcataccctttctgttcgccagggagggtaaggccttccataggggctcttcagagtgtgtcatatcatttgggatagggcctaggccctcccccatgtatttaggatcacagagaatctctctatatggaatgggctcccaaagtccattcctatcctagggataaatactgatgtactacaaaaggccccatagatttctgaggcctcctaactgaaacccacattcatggggtctgaatcagtcccatgctggtttctcagctatcagtctggggactaagagctcccccttgttcaggtcagctgtttctgtgggtttcaccagcctgttcttgacctctttgctcatcattcttccttctctgcaactggattccagttcagttcagtgtttagctgtgagtgtctgcttctatttccatcagctgctggatgaaggctatatgatggcatataagttattcatcaatctcattatcagaggaggacatttaaggtagcctcttctctgttgcttagattgttacttggtgtcatccttgtagatctccataacatttccctagtgcctgatttctctttaaacttataatggctctctctattatggtatctcttaactttctttattcttcccccaactcaatcttcctgccccctcatgtcctcttcactcctcctcttctccccttctcattctcctatctctctctccccttaccccatgctcccaatttgctcaggagatcttgtccctttccccttctccagggtccatgtatgtctctcttagagtcctccttgtcattagacaaactcttttaatgaggctacaattaccttggaacacaagccacacaaagacatgactaagaaaaagaactagagaccaatatccctcatgaacattggtgcaaaaatacaccataaaataatggcaaatcgaatccaagaacgtatcagaaaaatcattcaccatgatcaagtaggcttcatccccgggatgcagggatggttcaacatatgaaaatctaccaatgaaatccaacatataaacaaactgaaaaagaaaaaccacatgatcctcttactagatgctgaaaaagcctttgacaaaatcaaacaccccttcatgataatggtcctgaagagatcagggacaacaggtacatacctgaacataataaaagacatatacaataaaccaatagcaaacatcaaaataaatggagagaaactctaagtgattcctctaaattcaggaacaagacaagactgtccactctttccatatctcttcaatgttgtccttgaagttctagctagagaaataagataacaaaaggagattatggggatacaaattggaaaggaagaagtcaaactttccctgtttgcagatgacataatagtttacataactgaaccaaaaaaacactacaaggagctcctacagctgataaataccttcagcaaagtggcaggatacaagattaactcaaaaaaatctgtagccctacaatatacagatgatgaatgagcttagaaggaaatcagagaagcatcaccattacaatagccacaaacaacataaaataccttggtgtaacattaaccaaacaagtgaaagacctgtatagcaagaactttgagtctttaaagaaaaaaattgaagaagataccagaaaatggaaagatctcccatgctttttgatagataagatcaacatagtaaaaatggcaatcttaccaaaagcaatctacagattcaatgcaatccccatcaaattcccagcacagtactccacagatcttgaaagaacaatattaaaatttatatgaaaaaaacaacaggatagccaaaacaaccctgtgcaattatggaacatctggaggtatcaccattccacacttcaagctctattgtaaaactatagtaatgaaaacagcttattattggcacaagatcagacaggtagaccaatggaatagaattgaaaaccctgatattcacacctatgaatacctgatttttgacaatggagctaaagttatacaatggaataaagaaagcatcttcaacaagtagtgctgccataagtggatgctggcatatagaagacaccagatagacacatgtttatcaccatgcacagaacttaagtccaaatagataaaagacctcaacataaatccagccacagtgaacctattagaagagaaattgggaagtactcttgaatgaaatggtacaagagtccccttcctgaacattacaccagtagcacagacactgacatcgacaataagtgggatctcctgaaactgagaagcttctttaaggcaaaggacacagtcagcaagagaaaatggcagcccacagaatgggaaaagatttttaccaaccccacctctaacagacagctgatctccaaaatttacaaagaacttaagaagctagtttccaaaacaccaaagaatccaattaaaaagttgggtacagaactaaatagacaattctcattagaggaatctaaaatggctgaaagatacataagaaagttctcaacatccttagccagacaagaaatgcaaatcaaaacaactcttagataccatcttactcctgtcagaatggccaaaatcaaaaacaccaatgacagttcatgctggagagggtacagagaaagggaagtactcttccaccctggtgggagtgccaacttgtacagacactttggaaatcagtatggctattcctcgggaaaatgggaatctgtctaccacaagatctagcaattgcactcttaggcatatagcccccaaacccacattcatacaagggcatctgttcaacgatgttcattgcagcattatttgtaatagccagaacctggaagcaacctagatgatcctcaactgaagaatggatagagaaaatgtggtacattttcacaatggtgtaaaaaacagtgggaaaaaaaaaaaaaaaaacaatggaatcttgaaattcgcaggcaaatggatgggactagaagaaaccattctgaactaggtaacccagtcacaaaaatacaaacatgatatgtactcactcatctgtattttaaacttagagcaaaggattgccatcctacattccatattgccagaaaaataaagttctttaggttactgtaacatgaaacataaatgcccttatcccgaagctggttgaagtagacgcagacacctacaactaatcaccgaactgaactggaacccagatgcagagaaggacgagtgaagagaaaaggggtccagaccaggctggtgaaaccctcagaaacagctgacatgaacattggggaactcttgctggccagactggtagttggaataatagtatgggactgatcccgaccccaggaacatgggtttcagtgagcaaacctcggaaatctactggacctcctgtagtagttcagtacttatccctagcataggtgtggactttgggagcccattctataaagaggaatattccctgagccacgacacacaggatacgcctaggccctgtcccaaaggatacgatagactctgatgagaccctatggaaggcctcaccatccaggagtaacagaaaggatatgttatgataggaagggttttagttgggggagggtgttaggggagggggggagggagaagggagctaggattgtcatgtaaaacaatcctgtttctaattcaaattaaaacttctgaacaaataaataaataaaaatggacgaaaaaataaaaaattaaaaaaaaataaatgacccagagactgatattgggattcaaacaaactgagtatcagaaaagcaaagctgctggccacttgcttctttctgctacctcagcttgatcctgtttccatgagctctcaccatgcctcaaactgcaaactctcctcagtgtgacttgagaatgaatgctttatcttcagtgtgctagagaatgaatgcctcttactaactcctgatactaatttatataccactaatgagtgctgggattaaatgtataagttataattctcttttagactggtttgctcttgtgtagatctgggtagccttgaacttagttcccctcacccttgaactcagagagatccatctatctcttaatcccaattcctaggattaaatctgtgtaccaccactgccttgaatctagatgctggcattaaaagtatatatcacgatttcttgatctctatattttgaggctgactttgcttttctgaatcctcagttaaactttaataaaccataaataatatatcactacaggttacacttgaaatggtttcagatgaacaatagaccattttggaagccaagaaagctctctggatggaaatgccatacagttcaatataatctttattaatatatcaactaaatagctagttagtacttgatatgtatattatctattacacattccagtttcataatatttctcaatgtgaaaattatttttaaatacaagttgtccattgagaatgagatagtactattttgggacacttttacatatataaatgtaaaatgtttattacaagtgacacaagtactagtacagaggtcagtaaacaaataacattgaataggggagacaaaagaatctgctctcctgtgcattatggcacagcctaactattaggaacacagtgaactggattcattaaacacaagtatggccctatactgccctgcatgttctatctaatgatcattataatgtgactttctgatgagctgacaaacagaattgtgctttccaaacagaggctctgtagtttcatctgtaagtaaaaaggttatttgagtcagagtaacatgtatgaacatgaacaactggattttctacaagtattcagcttgtagctgtaagtccacgtcacagtgtctggaatatagtagctctgtagaaatatcaataacaatttattttgagattaaaatatttacataatttctgtcctttatttcctctctccagcccctcccatacacattgttgttcttaaaatcaagagggtctttgattggatgtgtgtgtgtgtgtgtgtgtgtgtgtgtgtctgtgtgtctgtgtgtttatgtgtgtatatttgggttgtacattcttttttatttttatttatttttatttttttgagacagggtttctctgtctgatagcactggctgttctggaactcactctgtagaccaggctcgctctgaactcacagagatctgcttgcctctacctccctcctgacttctgggattaaaggtgtgtgttaccactgcctagcttgtgtgtttgtaggatcattggttgcttccttccttttgaagcttgtatggcatcttctggtgccatgaaagtaagagtcaggagagaagctatgaggacagattcagcttgtgtcttctggtttcagtgtctgaagttcacagcatctttagcaataggaacttctagctcctggagtcaaccacagaaatagcatataatgggacactatagggacaccatgggacactaagacatcttttgtacaaccctgaacaacaacccaaaagaggtcttctcacccttgacactggaattttaaactgcaagttctaaaaaatgggactttgaaaattgatgttttgtatatttcctttagtgacatcatatgtaagttttccaagatttatctaagaggaaaccaaattatcatttcatctctgagcatcctccaggcagttgacttcacagcagctctgcagatgaagcagaggttctgttttagtgaatgttggatattctcacaaaagtatctcaaggaacaatccaaaaaggcagagaaagcaaaggtttccatgtgcatgccacatacacacacacacacacacacacacacacacacacacacacacatccctatatccatctcttctttaaagattaatgtcacccatgctatgaaatatgagacctaaactactaacaagaaaaaaaccttcatttctttttatatttgaaatgaacatttttataaagaaaacatgtattgtaataagtaaagattgagaatgttgaaaccaggttgctagttattatacattcttcttggttcccttaagaggtgtggagtttgttactatgctttacctatcctctcttcattatgtgtcttaattatgatatgtgaactctttatggagatcaacatactcctgcacaagacacttaccgttcatatactttcagaagatgaactgcaatgtcagaattttatacaggcattcttttatggaacacttcaggaaatatctttcttaatcttttggtagtagtggtcttacctacatatgtgtcttctgaaatttcacagaaaaaaaaatcagaaataagtttagaaaaatcattttgagccaaggtttctaaccacaaggtttgtcagaatataataagtatttgtcataagaagctaagaatttaagttcacttgaccttttcaggtcattggatttaaactccaagaacatattttttaaaagaaattatacaagtgtaaaatgtaatttttgaaaatccaacattcctggagaaccttctagaagatttttataaatcattttatccaatgtagaaatcctatacctgtattaagatctgggtttatcaaagcataaactgtcctttatctcacttaacatctccctctgctgtgcaggaattaacagccaaatacagttggaaaaaattctcattctaaataaaggtgacaggtacttcatagattcagcttgacgattaaaaaaaaaaaacctggatcaatgtattcttgtatctttcaagtagggaatcagggatccactcactctatgaggtattgcttaggaaaaaaagaaacatttgaaggaactcaaatataaatatcatagaacatactggggagcagaactagctacttccttttttacatatgaaattcaggcctcatctatcttggtctattgtgaaatatcttagttttgatttgcttgactagtttaagttatgattttatatttccttctcccatggaggaaatataaaaacactgactgtcaggaagacttaggcatttttactgctctgtaggatggaatgttcaacaatccctcccactttgtagactatggttgttggtatctttcttgacaaggcattggttttcaccatatttttcataaaatcagttatagaactccacgccaaacctttaaagttttacagttttctttctgtggggatcaaataagatatgtaaagagatttctaaggcaaacaaaaagatgatgatctgagtaatcactgcagtaatgtggacatatttaaatgtattattcagtcaatataacaatatatttaatgggattttatgttttgagtatgtacatatatcttggtttatttcattatacaaatatcagcaacctgaggttgcaacaatctgaagataacaaactactgagtgaatttggaaaaattccaggtttatgattgtattatattaggtgtgaaaatgaacaaatctattgtatgttggttaattcttccactcatcttcaaaaccacaatgaactctctgtccaaccattgtatcacacacagacacttttggattaatttaagcctcaccagtaaacatcttcataacctggtcaaccactccaagtatccttattagcctagaactgagttactttagttaaaagaaagagtgatatgtgggggaacatctgtatattgcaatatttcatcttaatccttatggtgttttgtaaatatacttactaatcaaccaaaagatatacaaatgaaggactttatgtaacttataatcttgccatttctgcaggggggaaaggaaaactggcatactataaaatggataaatttattcatcaggatgagttatttcacaatttatttttcttttttattttcttactttccttttttcccatgattgtcctgcaaaagagtgaagttgacatcaaagttaatgatattgcaaccagcaaaatggtatcaactagcctccaagacaaatgaaattgaaggtatatagtaggaaattatcaatacggagtcaggtagaaatataagggtatttaatagggaaaagccttacttacagagcgaaccagccagccagtggtagtctgtacagcaagaagcaaagagaaaccgaaactgaaaccgaaaacgcagtccccctactcactctgaccacgccctcacaagcctgctcaggtacccttgtagccagcccctaagaaggcgtggctacagcttcccctacaaaggtacttgagcagacaagagtggaaacagcacctgtaaagatggcctatgtacacagtcagcaagacaaaacggcagcccacagactgggaaaagatattcaccaactccacatctgacagagggctgatctccaaaatacacaaagaactcaagaagctagtccccccaaacatcaaacaatccaattaaaaagtggagtacagaactaaatggacaattctcaatagtggaatctaaaatgtctgaaagacacataagaaagtgttcaacatccttagccatcagggaaatgcaaatcaaaacaactcttgagataccatcttactcctgtcagaatggccaaaataaaaaaacaccaatgacagtttatgcttgagaggatatggagaaaggggaacacttctccactgctggtaggagtgccaacttgtacagccactttggaaatcagtatggtgactcctcaagaaaatgggaatcagtctaccacaagatccagcaattccactcttaggcatatacccaaaagaagcgcattcatacaacaaggtcatctgttaacgatgttcatagcagcactatttgtaatagccagaaactggaagcagcccagatgtccctcaaccaaagaatggatagagaaaatgtggtacatttatacaatggagtaaaactcaatggaaaaaaaaaaaacaatggaatcttgaaatttgcaggaaaatggatggaactagaagaaaccattctgagtgaggtaacccaatcacaagaagacaaacatgatatgtactcactcatatatgtattttagacatagagtaaatgattaccagcctacaatccacacttccagagaagctagtaaacaaggagggtcttaagagagacatacatggtcccctggagatggagaaagggtcaagatcccctgagcaaattgggagcatgggaagaggggggagggagctatgagaatgagaagggaagaagaggaaggatgcagaggtcatgagggagcagaaacttgagtcagggaaagaatacaagaaaggatatgtgaaaggtagtgtcttagttgggggtggtaggggaagatgggaggaagaagggaactgagattggcatgtaaaacaatgttgtttctaattcaaataaaaaatctgaaaaaaatggcctatgtgcagagactagtgatgtgctgtttgggttattcttctatttttacactaactaataacagcttagaggcagactggggccatgttataatttccatttcaaatacagaattctttggtcttggtcttactgtcattcagcatttggatttttccctcataattttacttttattttatttttttttcagatttctttctttttatttatagtgttagttacataagaaaaccgagactgaatgagaatatagggttttctggggttgatctcaacactgcaaataaatgaataagcaaataaatattaggtaaaattcggttatatcagagcaatgttgccccagcagatttagcattggaattacatacagagccttgagaaacgactcctgggtcagattctgggcctaaagcaatgccacatctgaatgtgaaggacattttacattttgaaggtctccagctcagtcttcgaacagaggtaaacatccctatcctcaacagtaatacacacttcacagttccaggctggtgatcctgctgtgcttcctcatctttctgtctgaaatatcaggaaaagtaaaatacaagacagccagaagaaatatcagtgtactgtcactctgataaagtcattctgctgtggatggcgctgaaggcctgagtgctctagtcaatcgctcctttgagaagctataagcacactgtggcacacattctcacccatgatcctacaaaggagtgcacagaaataataacaaaatattggtgagaatacataatgattattcactaagacaacatggaacagtattttgcacccaagtgaaataaaatatgttctttgaaatacaagagaattcttttcagtttgtttctggttttgttttttgttactagctatccttgcactctatattttaggctgagtcacaccttctttctaaatcagtcaaactacccagatatgcaaaagaagggtttctcagagaatctgagcatcttgtttctccttagccccagggattgaactcgagtcatcacacttggcagcaagcactttcactattgagtcatcctgccacttcctcttttcctgctgcttgtaggtacctatatagtcttttactatctctatatttgttgggttttcattatatttatgatatttaggtttattaaagaaaggcaccacaattttccaattgacataacaaacacaatgactgggtgtggtggctcaaagctgtcctgagacagtcctagaataaatatctactgttttctaaagtatgtgacaaagtggttcttgaaatagttatacctaatatatgctcaaataagtccaaagtcaatatagaattcaaggtaataggagtttattttaattttctctttgtttcttttttattttgttttcatttttgtctttttcaagacactatctttcactgtttctctggctgttctggaatccactatgtaaaccaggctgtccttgacctcagagatctggctgcctctacctcccaagtgctggaattaaaggcttgtgccactaggcccagctttctctttcttaataaatgcaaaattctggcttaacattgatattgaatgagcactggcatatcctactcaatataaggctatgagcagccctaagtgacaaaagttggagcatctcaaacgcactataccaaatgaaagaggccaattcagaaggctccttatgcctgataacattcacctaacattctggaagagacaaaattataaaggcagaaaacatatgagcgatttccaacggccaaagaggggatgggacttgagtagtaaaggaatgtctttgtgttatgagtatggtgaggtaggtacatgcatgactgtaggcaagagctggctgtctaatggtattaaaattactctctataagttacatcttaatttaaaaacccaaatattttcaaataagtgttgtctgaccccagatctgttttaaagtgaaggaaaaattaaggaccatcatggtgttgcagatttgaaagctctcattggattctaaaggtacggcgagtcactggactcttctattaacagcaagttaactgtgtgagacatattccagtaaggttgtaagcctggaagagtcactgctaccactgtcactttttgcatctgtttttagatgcagcaagggaggcactgtatacttgaaatttttgttttcacagctagaaaattcagatgtacgattgaacagaaacccaaaatttttaccactctcttgagaactcttgagagactgaggagcaaggacctttagtgtgaagctagcctgagcaagcctaggctacaggtgacactcacttaacaaaatgaaataattttactttttaaatggtcatgttgtaattattttttagtcctaaataccttgaaaacaaactggacatctgataaataaatcaatcaaatagatttaaacaaataacttacttgttaaataaatgtactattccaagcttcacccaagccagtgataggacctagaaggaagatggacaatcagtacttttcaaaacatagtggacaatcatcatgcacctttacttttccatctcttccatccagatcactttctcctcccccaatgccagcaaatccttgactgtgacataatgttcttgtcatattaattagttttctcgtttgagtcatctcctagcattccacatgttatcatgaattctacatcctcaatgaaaaacagatacttttaaatcatgtccttgtgccacaatcacaatggctctaaatgcagctatagaatttccaccttccctaacttagaacaatgaactttacaatcactacagtcctattacatacatatcatgcatgtttgtggctcaggaaacagaaaaatgatggaacctggctatccttgcctttatatgtactagcaagggtaggaatccaaggaaaagagtttcccacagacagaagtcaattactttcataggaaggattaattgtatcttatggcctctttataaaatatttattcagtatgactaattgctgattgaaaatttttctatgaaaagcaattgctgactctggatgcaaagagggcacagtcagtagcttccattttgtccatttcttttgcttacaggtaagtggtgatttgcttatttaacaaagttaatgtaatttacatgaaatatgttttccccttgggatattatacatttctgtaaagaaaatcaaagaaatttaaatgtgttctcaattaaatacagtggcccagattctggggctgaactgaatttctcaaatcatacttctgatgcttccatcgtccaatgactttcttgctctatgtgtgcagtagctaaaggaaacctcattacaggggattttaggggtcctcttagcccccaaatgcccatcaaccagacaatggcttctgatttcagccattgactcaagtccctttggcatattcagaacagaagatgctagtccagttcctccagggaaaaatctcaaagtgataataataaataatttcatgagagcattatctggcaagtattacctgaataatgtaagttgaagccaaaagtaattcaaagcatatttcaataatcatagtggtacttcaagtcactggccactacttttaagttgtgtatttggtttcagttcacccgaccatcgtggcactctagctttcttcctgacattaacactttttgttgagcctaagcagccaatgcagcagcctcattattcttggtacttctattcaatggcagcatcaaaaatggaagcacacaaggggaaaaaatgttcctgctgtgtctgtcttggttccattgcctcacaggttgattcgtatggaaatacaaacagtaggaataatatttcagtgagagaaagatgcagaaaaatctttattgatgagtagaggactaggtcattgcattcacatccacctcatttcaaatggaatctgcaatttaaataacacaccctataaattctgccatgcagatgctatgtaggcagactccggctgtactgttgggtgggacaatcagttgtattcctgagttgttttccacccacagagatagcatcatggagttttatttaattgtttcccataatatcagctgcctgaaggtaacacttccacatattatgataaattatggaagataccatatgtggtaagactagcagcgccataatgagcagatacaggcagtaggtatgttaatactactgcatctgctatttgtaggagaaaattatcagtgttagcaaagtttctcaatgcaaacccttgctttttgtctcagggttctatgaagcagtcaatatgaaccacaaaaaccttctcttactgtattttactttcaacatggtaatgtataggaaagcttataattgtggaatttaggtgtgattttttctaataatcagctgaaatacagctatggcccttaaaggatggtgttcaaagcacaaatagttacagtatgcaatccaattgcctagaaaaagcaaaagagaaattggttaatgctgatatatatgaactataagcaataacactggtctgcctcatctttgctaaacctcacattgcttagcatagctacctgcttgaattgtaaatatcttctcattcttatgaaaaccctcttagcacaacagtaaatcatgctagagttgaacttgtcacatttctacctcagtgtgtcattttgaatatttgtcatcagtgcagataatttctcttacgggacccacatttagcaaattttgtgcagttaatgatgtccccaaacttaaaacaaattatttttcttctaaatgagggttaaaaacaaaccactttaatgtattcactagttgctcattatgatacgaaatttccattttccaaaccacaagtatgcctcctaaagtccctgcttttcttcctttttcagtgtctgaaagttgaacatgagaaccaagaagcaataaaacgaaagtggtttcaggaccagtggatgtcacttggagtttattatttccctagaggcccaccttatattttccttgtcaagaagcatgcagacataggcacgcttaattgtcctaccaagtctcctgatatgaaatttagcatctcacagcctcgatggatatgtaagtcaatcagccatcgtaacagtggcatttaagatgcaagtaactaactggaaatcagtagagtacatcaaatttagttagagaaaaagaaaattaacttgatttaatgttaaattgattagttaaataataaagattgcaatttaatttaacatatttgcattgtatcaaattaatacttgtttgatacatgaaattagagtttctctaagttctacataaacaaatctgtattttctgagtaattttaatttgtaggatatatcttattcagttgtacttgcaaaatataatgaaatcctcagtatttcagtgctactagatggattttatggacatcaattcttaagaatgtaaaagacaaatattaataaattgaataaaaagaaatgcattgagaagttgtgacagagtttaattaaagtttctgtgaaaatggatatgtttgatgcctgcactgcctaacactataggcattggcagcatgtggcttttcagcaatttaaatttgtttagtataattaagtaattgaagttttattgtactgttcatatataactagtcactgacatggtagacagttaagtacatggggaataccaaagggaaattttgaggagggaaattagaggaaacattctagcaaagaagaaaaatgtacaaaatgcaaaagaagaaatagacatggctgacatggacagaacaaatacagcataaagagagagtttctaaaaaagatgataggaattgaatcagcaaaggattcattttcaaatacaacctccaacttagtattcagtctgatttccatataacagttttaacaatcccattaagctcctaggatatgcttattcatttttgaatagtatttgttggcttgtttgtagttttagtgcaggctgtccaagggcctcacacacactagcaagaactctagcactgagctacacccccagctccatcacaagactattctgacttgatacagcaaataaaaaatatgcaattggtaccaatcatgctcatatgaaattatattccatggacatataagtgtagactagagaaattaattgcatactgaacaagtaatgaagaaaaaaagaactcccttgggaggacttaaaagacagtttaactattcccattttcaactgtattataaagtttcagcaattcactacaagaataattgtttctaatgtagccatgacaatcattaaggaatttggggatattttctcaattgatagtttaatactgaatgtttaatatttgagaaaatattgttatttcaattgccatcaactgctctattcacaagaagtcaatgactaatgagaatattgtaaacatatataaaatcaacaaaataacgtttagataaactgaatatgtaaatgtcccagttttcagtttcttcctaggaacattgaatttctatgagactgggttgattggcagcaaaatcacttctttacctatcaacagatcctcaggcctttagtgctccagactttgtcttcttttttgtgggttttatggtaggctgaatctactttggacttcatggagcttatcttctaaagttaaaaaaaaagaaaagcagacaagccgccaccaattcaacaacacaatcacattgttcctgaattaatattttattaaatggttcctatgtagcaggtatggtgtaagaactgagggtgcaacccaacgtgtgtgtgtgtgtgtgtgtgtgtgtgtgtgtgtgtgtgtgtgtgtgtgtgtgtgtgtgtgtgtgtgtgtgtgtgtgtgtgtgtgtacaaaaaatggcagctgccctttggttgataccaattaatcaaatgaggaaggaagaaataagataaatcagtaaacaagcatgagacgatcaatttgaaaaggatgaagaacatatgaaatacatgcaggatttatatcaagatgggttaaccaggtaagttatgtttatgggcatgtggctatattctctaaaagaaaggatggatcaattgcccagatatctagtaggaaaaattttctgacgatcagaggaaatggagtgtaaatactctgcaccagaagtatgtagccatgttaaagaacccaaagatcacagtgttgccagagtacagtgagcatgataggatatgagggaatgattttagaaagcccacacctgtgggagatcagtcaggtactcttttctcctaatagaggataggttttacttctaatggaaaggaattaattgtagctttatgccagaagaatagcaagactgacttagacattactaagcaaacctaggctactgtgttataaattgactgaaaatgaaaaggaatacaaaaaaagaattgctgagaatactactgccacaattcaaatggaacaatgatatagaaaggatggtgagaagtgtggaaaacccatcctggggtatatctatgttgagtctttacacacctcttttgaacctagaccaattatgatttatttacaagttggattaagggtgtgaaaaagtattgtaaatataactaacaattttgggtggaaaaactggataagtagggttgtcataaactgcatggacaaccattattggctgatgtagggaacaaaggctattttaggttatgctgtaatataaaaagaagtggaaaaaaggagatgattgttaattttgtcaactggattatatatatatatattcttcagagataaaagcatccaagagaacaatagaccaagaataaaagttatgagaaagagaagcataagacatgttttaagtagcatcaaagagttcattgttgcctagagagatagtgtaactgtgagtaaagttataagagacacctgtaatgaccagatggtacaatatcaacatttttaatatatatgctttcattttaattgatacatgaaagcttatataattactgagtacactgatatgtaaataaagtatacaatgcatattcaacaaatgactgtaattggcacattccatgactccaagcatttttcatttctttgggttttattcaataccttccttattggctcttttgaagtataccactaattaacaacaatagctttcctcctgcatactagagcattaaaagttattcctccaagttttataaattcttgcacacactaaataccctctgtccatcccctcacgtctacagaagagacaatgtttaggaaaccatttataaaacacaaaataatagtagatagacaaagtgataattgtacagatcatacatgctgctttatgtgtttgtataaaattgcaatttgactttttttgaaaaagctgtagaatttatgtaaggattataagccctcatataatgctgattctgtcactctgggtaagcctaaatatttgtgaagtattaatgtatttcaaagggtatctgtcttcatttgtaaaattaattttgtggatgtgtgtttgtgcatacacactacatggaggcaaaggcaatcttgtactatccagttctctgaccccgtcatgcttattcctgacgattcaactcagattttctttgatgattgcagctgtacaatatgttttaattcatcaattcagtatatatttattattcaagattattcaaatctaatatttatgagacatatagttctgtgggagtttttctgactgaattttcttttgattaaaagaatcaaatgaaactagaatacaagccaactatcatcccctgttagaaaagacaatagaattacaaaatttttataatcaggatgtcagttaaatatgtcaggaatcttgggagcaaagaattatggttcccatctgcctcctgtaatgaaactcagttaacaatgattataaaatgctatagtattagtagagattttaaaatcagctttaacagaaaattaatattcaaaattctagtcaaactgctcaacacagtcatcgttgttagatctattgttctaaatacattgacttccacttttagagtaacttgcttccaattatatgatgcagcaagctttctcatcatactatctttgaaccaccagttctcaaaaaatgacctcgagacttattattgattatgaaatcttggccttcagcttaggtttgtatcaactagctgcttccttgtttttaaaatttaacttctttattgattctttgggaatttcacatcaggtaccccaattttgctcacctcctggtttctccatattctccccttcaccctgccatgccctccctacaaaaggaaacaaatccaagtaagcaagcaaacaaatgcaaaaacaaaacaaatcaaatcaaaacaaaacactccaaaccaaaacaaaaaccacaacacaaaaatctccttgcttctcttttctgcctctccaatacctcttcattcatcctgtgtattggaggctttagtgtgccatacagtatacctcattgtcccatcagttttactggcaaatgttcattgcaatgagtcacttgtctgattcaagacctccagttctggtacaccagcgtcactgaatcctcatgggaactcctctgaaatagctcttatggcttaaacaatttatattaatctacgatctgctacgtagtgctacttctcttccatcttgctcctcctgtttgctctctctgcctggcatgggactctgcctttcttcttctatgagttctctctctgccctgaagttccacctatacctcctgactagctattggccattcagttttttattacacaaatagcaacaatacatcttcacacagtatacaaatatcctacacagtaggaaaccatttgttaaaaagtaattacctactgaaacaaaaaaatgaaactgtcattaacagtagcttaaaaccagactgcccatagactcttccatttataacaaagaaataggtaacagaaatataagtgacatactgaataccccaaggacaacctttttatcatgttttttctcttttctaaaaaatatagtttttcctccccaactcctcccagttctcctcccatccaggaatatgataatgtatctaaggaataatgataaaataagacaaataaagcaaaaaaaaagatacaactcagaaaaggataaacaaacagaagaaaatgagctagttagattcttttggagaaatttttttgcaagaacctatcaattggaaatagcttgtaggttagggatggagcttgagtccacttctctcagctcagggatcttgtctagtccaggcctgtgtagacaccattcatgttgccacagtctccatggcttcacatgtctattggtgactttgggtttggaaggtgttgtttccttggtgtcctcagtcccctctgcctgccatactctttttgcctccttttccatggagttccctgagcctgagaggtgggatttgatggagacatcccatttaggacaaagtgttctaatgtctctctctatgaacattgtctggctatgggtctctgtatttgttcccatttgatgcaggagaaagattctgtaatgatggctgagaaaggcactgatccagaaggtcattagaagtaacgttattgctatgttcctctaatagtacatcagtatttgatttttccttgagtccctgggttaactcaactcagggtcttgcccgcctaagcagtgtcagttaaggtcttcatctcatggagtggactttaaatcagatcagatctcaattagttacacccaaagctttgtgccaacattaaaccagagtatcctgcagataggtcatcactgtagatcaaaaggttgatgttgcccagcactcgggaggcagaggcaggcggatctctgtgagttcgagaccagcctggtctacaagagctagttccaggatagcctccaaagctcacagcgaaaccctgtcttgaaaaaaaaaaaccaaaaaaaaaaaaaaaaaaagattgatgttcccctttcttttttgttagcatgcagagtactttccagtacattcaatattagtctgtaggggtgaaggctctagttaggcaccagctcaacttcatgttcagtgagttgtgtggttgtttcctttagcaatagtgccttaccaccactttgtgtagagcaatcaatacctttggaaataatctgggttgcttggggtttcccatgggacccctttatctagcaactcaattgtagttaccccattccggtactagaaattcatttagtgacaagagatgtccaatggtgctcgatctcccctgctatttggaaattacatttaggttgaattcatgtgtatatctttaatgaagattcaactttattaggtttccatatgacccctcaaatacactgtagtctatctgtcctttctcatccccagttgatcctatagttatggatatatctgtttaaaagacagaaatcagaaggatgaaggaggaggagaaagagaaagagaaggcaaagaagaaagcactaaatgtgaactatctcttcggatgaaatagaataaactgagggaaggcttcaaatggaatattttggaaagcaaaatatcagtagcttaataataagtacttgcatagtacatggaatatgcattcctttacttttgaaacccagtctgtttcattgctatgatgcaacagatatctgtaaacaagactactctggggcaataaggcataaatgatgcaaaaagacatgatgttgtgctgtttaaacttaattcagcaaggctatttgcactgctacgtgcaaaagtaaaaaatgacttttaaataatggacatagtttaaaatgttctgtattccaattcgtacataccaatatatagtgctttattctattttacttattttgatattatttcttacaaccaaaaagcatctgaatcagagtctggttattttttacaagcatagaattcatctgtaagagcattgacaccataattctaatccaaatggacattacatttcatgagctttgcttgatagtctgccaatgtttaaatgtgttttctagtaaaataagcccagggaatgattccctagagtgtggcgcctgaggcatggttgtgggcttttggcttcatgcttattaccacaaaacagaagggagtaatgggagttggagaattttgttagcatcagatatctgaaccccaaaataagtcaatatattgttgtaatacagttacccaatccacatagacaaatgaatagaggtacaaatctagttaagtaattagtacccaactcttcaacacatgaactttcagtttccataccactaaactttttaaatgtagtgaagaatagaatttgtattgggataattttaagccaactaacagctgatgttaacactgactgaatattagaggtttaataaatgtattttattattttttttaaaagccctcttttggacctgcccattttcagtctttccaccagggattccagaaagaggctcccaatcagcatctcccacagcattagcttttggggtacaggccccaatccaacagcaacagcaatacccagaaccttgctgggaagcacatgtttgacaataccaagatttacggattcaaaaactgtgaatgtgatctctagcaatcactgttgaaatgaactttccagctgagtatgtgcatacaacacatgaaccatttttctagttcatcattctagactcatagctaagacattataagtcagaagagactataaccctagattaagtctggggttcactagctaccaacctgtctccaatacattaataattcttcttgaagctcacctgacaaacttatttggcatgacagacatccatttacttgtttttattttggtaagaatgtgattcttgtaaagtatctactttatgtttatgtaatttaggaaaagttactccttaaaacatcccataatttctctaataaatcagcctgcccattgctgttggttgatttagaatagcatttgtgaccaaattctagaaaatgagacaaaatgggaactcctgagaaatataggatcattcctgatgacaagaaaataagagattgtagaaggccacttagggtgctgtcaatttggcatagaatgtgtgctctttctacagtcatttagggactgaatggatcttaagggaaatccaatgagtaagcagttacgataaacacaaagaagtcatagaaccatgactgggttgctgaaccaacctaaaacaatgaaatacacaagagctgtcttttctgatgtgtcttccttagggttaatgaaatttgaaacaaataagtaatgtctataagacttatgtctgcatttatctttgactagaacattgagaaagaatttttttttctttgaaacatgtccctatttggattcctcaatactttattttaactcataattgcaaataataacagaaataataatactaatattttcaaagaaaaaataatgctttaacacttcatacaaattatcttatttttagtatattgacaccttttatcctatgaattttaattttctcataattttaaattcttccaatgtttatttattcacattttaacttctctatttcagctatgtaatataattattatcatgatacatataaagtctcctccaagactttctatgtcatgaattagctcagaatatatatatatatatatatatatataattttatataattgataaatagatgtattagctttaattgtaaaatgtacacattgatttcttagtacacttaatttaaaaattgcaatacttttttattatgacttcttttactactttgttaaattttcaaacatcatttgaaaaaattgactgtcgttagcatttgactatgttaatgctgtttccttcagaactatatagaactagtatgataaactctatgccatttaacagtgaatcctccagcattgaagtaaaatgattttcctttttaaaaataattttcttcagattttgtgtgcctgtctgtctgtctgtctgtctgtcagtctgtctgtctatggggccataaatgggtggatttaaagattccttggagctggatttacaagcatttgtgagccacttaatgtgagtgttggtgtttgaactttggtcccctgatagagcaataagtcccttaattttctttaaactttctgaataatgagccatcatttcagctctatctgtctctctatctatatatctttctttttctctccttttcttgttgtcaatgtctctgtctctataatcttttttttaaatatttcatcatgacacattttagtttagtttatattgagacatgatattcttggttttcttttcctggaggattttaaaatgctatttctttaaatattatttctttctgattagaaacaattaaattagaagaagttaacaacaaaccttgtttttaagggtataaagagttctcttccatagttccaaactgtaatattttaaaatacattttttgaatttgtggtctaaattgaaaggacaaaatttagcaactgttagattactttcttcctagcaaattattctaaataaaattatgtcttcattatattctttttggatctgataatttactttctaatgtgtctttctgttacttttacttgattgtgacttttactaatattttaatgatttatacaattaaatatcattgtatatggaaaatatgcttatttttactcatgtccacttagattctaaattcatatcctgagtatttgcttttcctcttaatttccagtgtttattctgtacatacagtgatgtcaaggtcagttttgtctttatagttttctacattttctctaactaaatattttaaactttccttttgtaattcagtatctgaaattttagaatattgtacttgcctgtaatttttctacatgtactcatttattgttttatttataatacctctgttacagtcagactcaatttgtgtttgcttgttttgtcaatatatctttaatcaagcaagcaagacttgtttcttcttgtcctatgtaaactctatgtttcaagaagcctacccatgtatcttatatatataatattctgtcacatttttaaagaatattaattttgaatagccatacattgccttggggcccttcatgtattgtcttcaaccatatattttgtgtatgtattcaattaggtctatttctttcaggatttttcatcaagtaattttctatctagtaggagatgtaagagaaagtcatatcgcagtattgattccagctgtgatttgggccactctatagaaaatggagatacagagagaaatgcaaaccccctacttactagcttctgtaattgttagttgtatttatcatttctatgttgctacaacaaaatacccaataaaacctaagggaataaatatgtatttgactcacagtttcaaaaatttcagtcttcagtcaagtggctcctgtgcttttagaacttcatcaagacagggatactgtaaaatgctatagggaaggaaagtatatcagttcatgtcagtcaagattagaaggcaagaagtggcttgtggttccattgtagcctttcaaggagatgcactttataacctgcttcctccaataaaccaaccataacttttggcacatcttccaatagcacttattaacttggaaacaaaactcaaataggaagagatgtgataatttctttttagaccacgagtctctgaagacccagaacaagaaattagatgttcctactccatctcttctaggctagtagccctacctaagtgacctaatgcaccactgggaggagctccagcaatataatgcaggccctcaagtggctgaattgaatatgcttttgcatgtggctttgtaaaattgatttccacctacattgattaggttacattctgaagttattttccagagaacatgttatcaccatatatcttacagtaaattatattcatttttattttattgtgatggaattgtactagaaactaagatgccttctttgctgtggaaatttagtaaagtggaacaaaatgtgacatagccatcaaggccttgcaacttaagctgtcatttacacaaagcttaggagatcacattccagatcgctccttcttaattactctctaatacaaagtataggattcattataaaccacacaaagattagcttttcacttggattaggataaagaaagcaaaatcatccttttgtagatttgaggcaggaaaaaactatttggtttagtaatacaattatttccacttccttggggaatcaaatgtcctgcatgtaagcactttgagggttgaaactgcaatgttcattttgcttgcaagcttcaggagccttttgtagatacgggggccgaaggccatttttctcatagaaacattgtccattaggggtttttaaatgtgtccccgtaactttctgcaattatcccttgtcgaatgagcagaacaatagggcatccaaagaggccccagtgaatttctccctttcttttttttttttttttctttgtttcttgaaccttccagtgttgcttaatcctgcaattttaaagacacaatggctgttgtgtgtaagaaagtgttgtacaatgctttaaaggtctctgataactaactttcttcagtgtcctttgttttattaaccagaccactggggctaccccacttctttcatgtagttggtgtactttccctgtaggctcaaaagcagctatttaagacatccttaaatgtttcaattatataaaagacccactttagctctgagattgccagaccatcagcctttccaagagttgacatacctagagaccaatcaggaagtcacaggagataacagtcacgggttgctaactcagcaagaaacagttgtatagcaaagagttctctttccatcgtcactgtttcctgtcttgaactgtacttttccaactcccctaaaaagttaagggcaatgtctacctcagtttcctaagcattgaattataattgtcaaagaaaaacttggacttttataaaactgccctgcttgctaccttatcaaaaaaaaaaaaagcttcatttcaaatgttcactgttagtacaacagaaagctaataagacacatgagaaaggataaggggggaggcacattttgtgcttagagtttaaaattgtttgcttatccagagaagtatattctgacaaaactagtcaagcatagactcacagcaaaaaatgaactaaagcaaagcactgaatgaatgctgcacatttcctattggacctgatttactctcattctaataagctgcatgggtggaacagggttgaaaggcaagcacattggactcatatttgccgtctatattttcagaaggaacaagcactataaagacaaagtaactcacattttactttctatccatttattaaatcaaattattattatttgtagatacaacactagagaaagtctactgagaactattttattccaaacttcaagaaaataaacaggatgttaattaatttatgtaatttcggtttagcattcaaggataaagtgataccatcttcgggaatactgttggagtttgtgttttgcattccttttgaggctttcagaactcagaattagtctgacttatgtgcaggcacctaggtgaaacttacaatagcatggctgtcctaggggttttataggttttccagttgttacaaatttgcatcagtgacatttttattcttacttttacatctgattgtgtgtgcatcccattgtttacagtatacccagaaatgatgtgaagtcaaacatatttattctcatttcattgacatttctagaaatggataatgatggcaatcaaaagatttatggagcagacatgatggttcatgtgcgtacatgtcttctaggattgtgggcacagctccgcaggctagtcactttactgaatcatcacttgtaaagttttatagtgtacaaaatcccaagtaccatattagttcccatggtatatctcaaaatagttcagagaccaccatggtggcaattccaacattgttgaaatccagctgtctccagagcaatctttcctacattagttagaaatttttgttgcttcatgttgtaattaattttttacataccatcttccacattaaattcagattgaatagaaaacaaattagcatgaacacaatggtttccttagttaatgaaatgaatataaaatacataaaacattttacttcttgtagtatccacatggcagtaattttcacattgttattttctatgttgaaatataattgacagtccctttagtaaagaatgatgagtgtttgatatacaggaatttcattggagataagaatatttggctttttctaggaaacaaggaggaccctaagagagacacacatagtcccctggagaaggggaagggaacaagatctcctgagcaaaattgggagcatgggggggagggaaaaggaagctagaagaatgagaaagggagaagaagaggggtgaggaggacatgagggagcaggaaggttgaattgggggaagaatagaggagagcaagataagagataccataacagaggaagcaattatatgtttgaagagaaatcaacactaggtaaaagtctggagatctacaaggatgacaccaactaacaatctaagcaaccgaggagaggctaccttaaatgccctcccctgataatgagattgatgaataacttatatgccattctagagccttcatccagcagctggtggaagtagaggcagacacccacagcaaaacactgaactaaactgaaatccagttgcagagaaggaggagtgatgaacaaaggggccaagacaaagctggtaaaacccaaagaaacagctgacctgaataacagggagctcttggtctccagactgatagctgggaaaccagcatgggactgatccagacagcatgaatgtgggcctcagaaatctatggattctcttgtagcagttcagtacttatgcctagcataggaatggactttgggagcccattccaaatagagggatactccctgagcctagaaacatgggggaggacctaggccctattccaaaggacatgacagactctaaagacccctatggaaggccttatcctccctggggaatggaaaaggtatgggataggtaggattttacctgggggggggatgagggaagggagagggaactgggattgacatgtaaaacaatcttgtttctaatttaaataaaaatggagaaaatatatttggctttttgtaacagaggttttacttgtgcaaaattacttatccaccatctaattcatctctctgagtccattcatgggaacacatttgcccatttagctctagaatctgctcctgctaattctaatgtggtttttgagagttattttttttcagtcatgtttcagaaataacatatcaatgattgcatctaaaacactcaaggaggaacattggatggcttaacaggtaaggaaactgatacacaggcctgacaacctgactttgatctccagaacacaataagatggaaagggaagatcagacacccccacatgtgactgttatatatttccactcactcatggcatgcacatttacatacatggtgcacatatacaaaatcacacataagtgattaacaagaaagactaaataaatgaaataccaaagggatgcttctgtgttttgccagtaaaatagcccttgactcctcttctttatctttattttacacaaggttgttttcattcttaagcttcagtaattttaaagtgccattatttttataaacctctcatttttcactataattatttacaaatcacattttcatgcatagcagtgatttgacaattgaagtgatataagtagcatgattgagtgacttaagcaggtagagaatgagactcattttcaaacattagtttatgcactgatggtgaaaattggcttactaagctcacttccctgagttcccttgtgaaggtaactctacattgtccgcttctctagatttagaatctcctaaagatttgttgaggtatatcactaatttccatagattaactaggagaaatacctctgattatgggcagcaccattactactgccaatggactcaacaaaataaaagcattaaaaaaggaaagccagtcaagcagtggtttgtacctctttctattccatgatgacttaaagtgctatgctttaccttaccttccttatcctgatggactgaaatttccacagtcatgggccgagataaatattgcctcctttaaatcgtctatgtcaagtaataaagtaagaaaaataactgatacaaccccaaattttagatttttttgcattacatggctctcatagaagtttaataatcctatgtcacaatctgtatctatgttctcccttcttgaggattaataatttttaagttatattaaaagaataattattacccagtccatcattgaaatcaatttcctttttgtaatcacaacggaatctattatgatagaatgagttataatttatttaactaatctagctctattttcataatagtagtcaagtagtttggaaaatgattcatgctttaatttagctgaagtagattgtttgttaataaataagaggatctagggcagtggttcccaaccttcctgatgctgtagctctttaataaaattcctcatgctgtggtgacccccaatcataagattatttcttattgcttcctaattgtagttttctgctcttatgaatcagaatgtaaatatgtgatattcaggatatttgatatatgatcctagtgtgggtctcaaatcataagttgagaactacagatctaggattaccactataacaatgtatatatcaataacaaggaaactgtctctgcttacactcatatttctttcattagttagcacagttttgtctatacattgtcactaaacaataaaacaatgcaggagatccatttatgcaagtttcttaaaaccaaaaataattggcttatctactctaattattgcattttaacctaactacccaagaattttttcacattcattcaggctatgatacatcacctcagacttcaagcttctaaagtatttgaggtacattggtgattctttggatcaaatcaaagcataaggacacaatgaagtcattcacatacattccaactatggattccttatgtataacaggttggaaagtttggaagagatcctcagtaacaaaaacaaaaaagaaaaatggcaaatagattgtagaactcatatacgtagtgttttgttttgaatgactataagagaggcagatttgttttaattattggtttccagttactggaactgtttgggaaggattatgaggtttgaccttgttgtggtaggtatggtcttcttggagaagatgggccattatgaatacccattgatgtttcaaagcctatgccagactctgtctctctttctctctccccctactcccctctctgcctgcaacttcttgatcagatgataattctcagggtacttttcattccttcatctgcctgtctgccaccatgtttcctaccatggtgatcatggatttaagcaagaccccaattaaacactttgttttttgatgtctcatttcttgagttccttatatattttggagattagcttaaggctggtggaaatgagttcacaagacccagataaatgattagagttatttattagggaagcacttacacaattaacggtaaataaccaccattgatcttcctgctcctgaagacacagtctctgccttctggatctctgcctactgcccaacagagtgagccaactcctcctcttccttataaggggtcacctctgcacacctgaagccatgcccctaggttgcagccaccatagcaagtccactagctaaaatagaatgccgctccaattagccctttgtgggatgtggggtttcgtgaaaatctttccccattgtgtagtatgctgttttgtcctattgacggtgtcttttgttgcctagaagcttttctgttgtgaaatatttgtgtaactaggcaaaggtgtgttacacttgtttatgctgcatttgtttaactatgtaaagatgtgctatatttgcattaattaaatgaaataaatctgggctcaggagaggtagggttagcaactaattaacatgaagtatcagggaggaacttagcatgggatttgtttaagttggggaggtgtgaaaggagagaggcttctggggatgccaactaggagaggaagctagccagttgctactcaacctctattagatcattgcagtttttcatcctagtctttgaatttcaagttttattagaatgatagagagttagttaaagctgcctttacctacagcaatagaaacattgtctgggcaaacagaattcctccaggccacagccttagtagccaggacactagtagtttaaattgcagctacttttcagtttcatgatgtcctatttattaatcatcaatcttggtgtctgtgcttctgtcattctatccagtatattatctcctgtaccaatgcattggaggctacttcccatttttgcttctatcacatttagtgtatttggtttatgctgaggtctttgctatacttgagttttgtacaggtgataaatgtgaatatatttgcatttatctacatactgacatacagttatgctagcaccacttgttgaagatgattcctttttttcatggtacaattttggcttgtgtgcatttagatctgggtctttgacttgattccattgatccacctgtctgtttttatgccaatacaatgtgttttattatgtatctctgtgatagagcttgaacttacagatggtaataccccctgcagttcttttattgttcatgattgttttatccatcctgagttttgtttttgtttttgtttttccttatgaagttgagtgttgttctttcaaggtctgaaaataattttgttggaattttgatggagactgcattgactctgtagattgcttttggtaagattggtaaaatagccatttttactatgttaatcctatcaactcaatattctaatttcaagtgatagagaaacatataaagaaaagctcaatattttttagctgtcaagaaaatgaaaatcaaaacaattctgagagtctatcttacacctaccagaatgtctaagatcaataatacaaatgacaacttgtgttgcagaggatgtggaacatggggagcactcctccattgttggtgggagtacaaacttgtacagtcactttgaaaatcaatatggcagtttctgagaaaattggaaactgatctacctcaagacccagctataccaccttttggcaaatactcaagaatgctcaatcatacaaaaaggtcacttgttcaactatattcatagcagctttattcattatagaaatggtcattaatttccatcaacattaactcctctataaaaagacacagattagcagaatggataagaagacagaatccttccttctgctgcatataagaaacacacctcaacttcaaagacagatggtacctaagaattaaaggttggggaaagattggcccaatcaaatgggcccaagaaacaagcggaggtaacaattctaatatccaacaaattggactttaaactaaaatcaatcaaaagagatgaagaaggtcacttcctacacataacaggagaaatccatcaagatgaagtctcaattctgaacatttataccccaaatacaaaggcatccacgtttgtaaaataaagtttactaaaaatcaaatcacacataaaaccgcacacacttaaagtgggagatttcaacaccccactctcaccactggacaggaacaccagacagaaacttaacaaagaaacaaaagaattaagaagttatagtgcaattggacttaacagatatgtatagaacattccatccaaatacaaaacaatttaccttcttctcagcgccacatggaaccttctctaaaatcgaccacatacttggcaacatagcaaacctcaacaggtacaaaaaattgaaataacaccctatgtcttttcagaccaccatgctttaaaattagaattcaacaacaacaagaactacagaaaacctacaaactcatggaaattaagtaacacccaattgcacaattcttgggttgaggaagaaataaaaaaaaatttcctagaattcaatcagaacgcagatacaacatatccaaacctatgggatactttgaaagcagtgctatgaggaaagttcatagaactaagtgcccatatgaagaaacaggagaataatcacactagagaattaacagcacaactgaaagctttagaaaccaataaagacaatatacccaggaggagcagatgccaggaaataatcaaattgaggggtgaaatcaataaaatggaaactaggagagtaatacaaagaatcaatataacaaaaagttggttcttcaagaaaatcaacaaggtagacaaacctttatccatacttaccaaacaacaaagagagaacatgcaaatcaatgaaatcatgaatgaaaaaaggggacataacaacagacacagaggaaatccagagaatcatcaggtcatacttggaaaacctatattcctcaaaattcaaaaatttaaagaaaatggacaatttttgagaaagatttcacttaccaaaattaaatcaagaacagatgagcaacttaaatagacctataacccctaatgaaattgaagcagtcatcagaagtctcccaaccaaaaaaagcccaggccaaatggcttcagtgcagaattctaccagaaattcaaagtacagctaatcccaattatcctcaaagtattccacacaatagaagcagaagggtcattaccaaactctttttatgaggcttcaataacattgatacccaagacacacaaagacataactaagaaagagaactgcagaccaatattcctcatgaacattaatgcaaaattctcaataaaatactggcaaatcgaatccaagaacacatctgagaaatcatccatcacgatcaagtaggcttcatccctgggatgcaaggatggttcaatatatgaaaacccattaatgtaatccaccatataaacagactgagggaaaaaaaaacaaaacacatgatcatgtcactagatgctggaaaaatccaacgccccttcatgatatgccgaaaaaaatccaacaccccttcatgataaaggtcttggagaaatcaaggataacagcaacataacaaaagcaatatacagcaagtcgaaagccaacatcaaattaaatggagagaaactcaatgcaattcctctaaaatcaggaacaagacaaggctgtccacttcatacctcatcaatattgtccttgaagttctagttgagcaataagacaacaaaaggagatcaagggaacacaaatcagaaaggaagaagtcaaactctcactatttgtagatgatataatagtctccataaatgacctgaaaagttctaccagggaactcctacagctgataaacaccttcagcaaagtggcaggatacaagattaaataaaaaaatctgtagccctactatatatggatgacacattggtggaggaagaaatcagagaaacatcatcaaaaacaacataaaataccttggggtaacactaagcaaaaaaagttaaagacctccaccataagaattttgagtctctaaagaaagaaattaaagaagataccagaaaatagaaagatctcccatgctcttggataggcaggatcaccatagtaaaaatggcaatcttgccaaaagcaatctacagattcaatgcaatccccatcaaaatcccaacacaattcttcactgaccttgaaagaacaattctcaactttataggagaaacaaaagaccgaggatagtcaaaacaaccctgtacaatagaggaacttctggtggcatcgccatccctgacttcaagctctattacagagctttagtcctgaaaacagcttggtattggcacaaaaatagacaggtagactgatggaatagagttgaataccctgatattaacccacacacttatgaacacctcatttttgacaaacaatccaaatatatactctggaacaatgacaacatcttcaacaaatggtgctggcataactggatgcaaacatgtagaagactacagatagaccaagcctttctccctgcacaaaacttaagtcaaaatggatcaaatacctcaatataaacccaacataataggttcagccacactgaacctattaaaagagaaagtgggaaatacccttgaattaattggtacagcggtctacttcctgaacataacaccagtagcacagacactgaggtcaactattaataaatgggacctcctgaaacttagaagcttccataaggcaaaggacacagtcaccaagacaaaacgacagcccacagactgggaaaagatacttaccaaccccacattttagagagagctgatctccaaaatatacaaagaaatcaagaagctattctccaaaacaccaaacaatacaatgaaaaaatggggtacataactaaatagacaatactcaatagaggaatctaaaatggctgaaagacacataagaaagtgttcaacatccttagccaccagggaaatgcaaatcaaaacaactctgagataccatcttactcctgtcagaatggctaaaatcaaaaaacaaaaatgacagtttatgctggagaggatgtggaaaaagagtaacactcctccactgctggtgggagtgccaacttgtacagccactttggaaatcagtatggtgactccttaggaaaatgggaatcagtctaacacaagatccagcaattctactcctaggtatatactcaaaagaagcacattcatacaacaaagacatctgttcaatgatgttcatagcagcactatttgtaatagccagaaactggaagcagcctagatgcccctcatctgaagaatggatagagaaaatatggtactttacacgatggagtactactcagcagaaaaaaaaaacaaaaaacaaaaaacaaaaaacaacaacaacaacaacaacaaaaaacaatggaatcttgaaatttgcaggtaatggatggaactcaaagaaaccattctgagcaagataacccaatcacaaaaagacaaacatgatatgtactcactcatatgtggatttcagacatagagtaagggattatcagcctacaatccacactgccagagaaactagtaaacaaggaggatcctaaaagagacaaactttatcccctggagaaggagaaaggatcaccatctcctgagcaaattgagaacatgggaagggggggggagctaagaaaatgagaagggaagaaaaggaaggattcagaggtcatgagggagcagaaaggttaagtcaggtgtagattagaagaaaggatatgtgataagtaggattttagtcgcggggggggggtgttagtggaggaagggagggagaatggaactgggattgtcatgtaattcaatctttgtttgaaattcaataaataaataaataaaagaaaagtaaaaaaaaaataaaagtccaagatattaaaaaaataaataataaagtaaaaaaagagaaagtttagtgttaacaaacttttgtaacctatgtttggggggttttgttccaccaaccagttaatggagcatttcttttatttttctattagatctttctaccatggcttatcctgtaggattgtgtggtacatggttacattacttattttataatatttgaaaaaaatgttccaatttagtggtgacatatgctggagaattgtcagtttttatttgtgcagttatatccataaccgccatcacctctaataggtgtgtaataacagaatcggccttttcagagctaagagcagtacccattgaaaccctgagaatgtgtctatagtatgatgcacatgctttcaatttccaaattctgcaaagtgaaagacatccatctgccaaacctcatttctctggatgctcttaggattacagcctgctggcaatggagcttgattataaaaggaacaggtggtaaagtttctcactatctccattggttgttgccaggtgatagagaagtcctttttcaaaccttcgctatttacatggtgtttcttatgaaattctggggcttctagcatgcttccttttaataatgcttcaatcttatcattgccttgtgttagtgggcctggcagacccgtatggaatcttatatgtgtaatatagataggattaattctgttcctgattgtgtcctgtaattgtataaactgtgaagttaattctgtattatcaggaatgaattctgcagtctcaatgtgtaaaacaactctctctgcatattgagaattatagcgggagccgggtatagcatgctcgaagacaatctgtactctgtaaggctaagatttctttactcagataaacaccagccaaatgcaagccagagtgtgcccagatgcagctagagaggccagagagaagtgtctctccatgtgtcctcagttccttaagtattcccccacacatcatcttccaaccccccttactacactctcagggcgtggccaggtacacctgtagtggctactaggaggcggggctacagtgtctccttacagagaatcagtaactatattaagaggctctataaaatccataagtaccataagaattgcgtataattctgccttctgtacagaggtatatggactttgaactactttacttacctctcctgatttatatcctgccttacctgatttgttggcatcagtgtagaagataagaactccagaaataggagtttgtcttacaatatgtgaaaggatccagattgtatttgtatgaatttaattctgtcaggtttgggataattgttgctaattgttaccaaaaagtcagtaagagctatctgccagtattcattgtccttccataaggaggaaatttcctcattagttaaagatactataatttctgctagatcttttccatttagttgatgaagtcttaatttgccctttagaatcaactcagaaatctcttctgtgtttagcttcttattctgtttatgtggcagaaatatccattttaatataatatcttccctctgcatcagaatccctgaagggtaatctctggatgataagataaccataatacagtctaaattaggatccacatggactacatgagcatccagtattctgttttctagccattgtaattctttttctcttcagaggataatatttctgaactgtttaagtccttgtcacctttaagggccatttttaaatgcttaagtcatgtccttccacacaaattattatctgtagttgagaaatttccccaatagcttctgaaaactattaagtgttagataattatctcttctaatttgtactttttgaggtctgattctttgtacgtctatcttataacctaaataattaatagactctcccccagtatcttttctggggcaagctgtaaaccccaacgaggtagatcttccttcactgtttcaaacattcattctaatattagactctgataataaaatatcctccatataatgataaagaatggattgtgaaaatttcttatgaattatctctagaggtttatgcacaaagtactggcacaaggtagagctatttagcattccttgtggcaaaaccttccactgaaatctcttaactggctgttaattattaaaagttgccatagtaaacgcaaatttttcactatcattttcttgtaatggtattgtgaaaacacaatcttttagatcaatgactatgattggtcatcccttaggaatcaagaaaagcaatggcattccaggctgcagagagcccattggctgaattactttattgatggctctcaggtctgtcagaattctccacatacctgacttctttttgataacaaatactggagaattctaaggactggtacattcttctatatgcccagcctctagctgttcctgtactaacttttctaaagcctcgagcttctcaaaagtcataggccattgtcctacccagacaggttcatctgtaagcaactttcaggttagggcctttcgctcctctgaagacttatcatttgtattttgtttctgtacagcctggatggttagtaactttttcgatagtgccttactatattttgactacaatctaaaggttggatatgatttgcatctgatactggaggaataataatctaggtattccattgctgtaaaagatcatgactccagagatttatagctatatctgctacacatggtttcaaccttcctctctgtccttccagtccaaagcagacaacccagttaacactatgctgaactctaggtaggtccaatccctaaaaattgtgcattcacctctctaagaggccatctctggccaggacttttgggtattaatagttatgtctgctccagtgtccaccaaattgataataactttattattaattattattttcaactgaggaatcttatcattaatagaaggttgcattttttgtctcctctagtctcatttgattcctcattactagccaaacttccatctagagtagtatcatttttttcaataggcaaagtactatctattcatcttgtgagagattgtcctccacagtggctgggaatgactggacctttctctatgtgggggtctttgagaggtccctcaaggaatttactgattgtaagaggtttccttgcatgtctttggtctatatacattcatcagtccagtgcatgcctttaccacatctcctacacaatccagaaggcagaggcctcctatatgagtcattgttggaatttcattgcctgcaattccccttagtatgtcctattctgtcacatttgaaacatctaggttcctggtaccttcttggccctctggggattgttctttctatccaagttcctgttccattacagtgagagcatctggtctcttggtgcctattttgacatctgtaagttacttctccttctcaagctcctgtgtcattaccttgagaatatttaacctcttggtgtctctttaaaccatatgaaatctctgcctcctgagtgctgtcatcagagaggcttcatctagtaactgataaaaacagatgcagtgacccacaggcaaacattaggccaagctatagaaatccccctgaagcatgggaggaaggcttgtaggagccagaagggtcaaagaatcacaataaaacccacagaaataaccaatctaccccataggaagtcataatgtctgaaccaacaaccagggagcttggacgggaccaacctaggccctcttcatatatttgactgttgtataacttggcctacttgtgggacttccaacaatgggagcaatgtctggccctaattctttgtctggctcttggtaacctatctcccatagtggattgcctttccaagctgtaatacaagggcttttccttagtcttaacacagcttgatatggcatgttttgttgatacccatgggagtcctgtcatttctgaacagaaacagaggataagggaagggtggaggggattggaggaaaggaatgggaaactctggtctgaatgtaaagtaaataaataaattaattaaaagaaagcactttgttttataagagtaactaagacagaagttgataccaggtgaggagtatggctgtgacaggcctgaccatatggtctgagagaaaattggaagactttgggatgttgaactaggaaagcagttgaatattttaagtaaacttaatgggatatcctgatagaagcattgaagacagtagtgctgagagttgtgtggactacaaaggccgagctgaagaagtttcaaaggggaagaatattagcagcttgtggctatatttaaaaatttgggttaatgtcttgacagaggagatttcaaaagagcctattattaactgtgtcacatggtcataagttgacactcatacaaatatgcaaggagaataaacaaacagggctaggggcaacacaaaatgtaaagtttgaggagaaaaggtgcactagaaaatataatgttggagccaagtattttgctcaagtagatgagaagtttaaatgaatgcctgatgctaaatagagtaaagggaattaaaacctcaaataaaaaccccactgggataatactgaaacctgtgaaaggtgtgagtgatttcctatgccttaataacaagggaaagattatgaaattatatttcaaggaatgggccaaggttcaactgctcaaggaaaaaaaattgactgcttcagtcatgtagttctagatttagagtcaaaaaggaagagatgttgaggaaccttcctgtatgcttaaaaaaagctactgaggccaagtatgtgtcagagacatccctccatggagactgggaggagtcattgtgtgaagagatgaaggtgaagacttggttgtattggagactccaaaatattggagatggcaaagccatgggatacctgcaaagagagttgcttatagactaggataagagagagagagagagagagagagagagaatgtgttgcaggcagcaaagttggaaatggagaactacctaaaccctttaacatcaaacatggagttgcagaatttaaagtttatccttcgtgcctgtgcctctggatttcagtcttgctttggtcagtgtttgaatgataatctataatctgtgccattgtatgtgggaagtatgtaatttactttctgattttatagaagtttacagtttttagattgcctcgagtctcaaaagagacttggggctttggaattttaagcagtcttgagcctgaatgactatgggtacatttgaagttaaactaaatgcattttacattatgatatggctacaaggctatgcgtgtcaagaagtagaatgttgtggtttaaataaaaatggtctcatgggctcatgtgcttcagtgctttgtctccagttagttgaaatatttagggataattaggagtggttatgttgaggtagatatgtcattgttagagtagatatgtcactgtgggtgggctttgagatttcaaaagcacacacacagcccagtctctctcctaaatatttcaggatatgaagggttttgtaattttgaattgtctgttgttacttttcttcatgaatccacataataaacaaatttgaaacaagatatggtggtaaaatgacacggatatgtgagtccattcttgcagcagattatttaacctaagccacctccactgtggaaactgaaaatgtgactttgaaagaacatgctcaatgtgacagcaaaattactttgtgtttatacatttttcatagtgttgttcccagtagaatgaatttctctattttgtacggcaatggtctgaagaatctgcctttaaaaggttcacaatctgctgacgctgatgccagaggtccttgttagctaagagacaatgttaagcctaaatgcaccaaagagaaaacattgagacacccagaggcttcacgaaagtgagttgcatgaccctatgtcttcacatttgtggagtaaagaagggaaagttagaatagaaatgtggtaaactacgagaaacgaaataaaacagtcagaaaaccctcataccccgaaacacttatgctttatctaagccagacaatacaccactgagcttaataaatccatacttactttttatatcttgcaaggtcatagatgatgctgacactggtttcctagcaacccactctaccagcctacttttgtcctgatcactaaagaatgggtttggaactgtcagctacatattaaaatgaaagagaatcagtgtcattagccaagtacacatgaatgaaataaagatgtgcatgaatacactcagagatttcctccttacacatctaaaactaaattggaaaaagtttctttcctataattttcttaatacccaatagtctcagaatcatctcaaattaaagtattcaaaaggttttttttgcaaagcacatgtgataataagatatttaaactcagtatttattaaaatgactatacatagcaacaaaactggtgaccaggatattttggataaaatacttgagtgaaaataacttacattttaatgtagaaattgtttaagtatagttatataaatagaaatttaaaaggaaataatattttatgagtaaaacaatatattgtccatttatcaagtttgtccttccagtctgagatattattttcagaactctttctgtttttgtttatttttatggctataaattttgggaagattatgctcctctaagctttctctttttctttcttaagaaaataatttttgtctaggtattcacataactttcctatctctataattctatcatttgcccctattttgttggattggtttatagactgttgtcctggaataaaagattcaagtactttttcctgttctgtctgtttaatacaagacggtaagtattaacatcgagtaatcttcctactgacagatgatctagctcaacttgttccttaattaggaactcctcatccaactccattaaaaacagagagtataagcacaaatttgagtttgttgctttgtattgttgtttctgagttactaatgcattctaatgcaaccaaccttcccataatgttccaatgatatattctttttaaaaggcaatgaaagtgcattttctatcttttgttaatgtcattcttatacccaagactcagaatcatgcttttggaaacataaagactatataactattatttactattagtgtcatgtctaatttattcattgatttttttcatacattcttttgactttcataggtttttttcaaagcccatttcctatccatacaattcatgttctttctctctcataaaaaagacagcaacaacaaataaagtcctatcaatgaggaccaattactcctgagagtgattactaccctgaaatgtggctgataattcattattactcctggagaggggagatgggataccaaacaaacaattaccaacaactaatttttattctctcagtaactatcaattatgaatagcttcttgtctatgagtggaacttcatacctacttcgggtcctccatacttggatttcgcctggcttgagctttctcgggtcttgtgtatgtggtcacaatcctattcatacgtgcatccaacttgttgtgttgagaaaataaatcactcttgcaatcttgatagctcattttccacatagattcatgagtcttgagaggaagggaacaataaaggcattctgctccaaagtcattcactttctgcacattgttcagttgtgagtctctgtgtcaaagtccatatactgcaagaagatgcttctctgagaaaggtctagcatttccctcatctatgaatataagaatatttcaccaggagtatttttattactatgttgatttagcagaataatagttttcagctagggcccatgacctagctcttctcgtgttcttgtccttattaacagtgtcaggtttgtattccttcatggagttggccctaaatctaatgtaacagtagttggtttctccttaagcctccatgctactactgtaccagtgtatctttgcaagctgattgttaaagaagaaagaattcagaaattaattcatgcatatgtggctgtgagggttaatattctcaaattgacaggatgtagagtctctatggatacaaaatttggacacctctgcatgtgaatactctctaaaaattggcagcaccactccatggtatacagtcctggactgaataaagaggatagggtgaacagatcatatgcatttgtcactctgttcctgaataggaacagctgcttcaagctctggccacctcatcttcttcataatgattggccatattatttgcaactgtaagcccaaataagccctctactccataagctgtttttgtatggtagtttctgacagtaatgagaaaagtaactgataaataaaaaacaaataaaataaaataaaataaaataaaatatcactggaagtattattgatgtaataactccgtccaacaggctgtacaggctatgtggtaaagtgaagcctcctacttttcattgctactatagaaaagtcattttcagaggaagatctgaatagttcaaaagtgaatacttgcaaaattcaagttaattgaatgtcaccaaaggggtttcctattctatgaaagcaactttggaaggaaatgtttcctataggtgaaaatgccttaatttatgtactatggtctaggggggacatggtccatctggagctggaagcagaacttgggaccattaaccatatggtactgattttggaggcaatggagagagtagaaaatattacaaattccgggaccattggacatctacctagaaaagaaagaaaaagctacatgtattgcaagaagcaagtctggagagattgggccacccaaacattttggaacccagatgagttcttcacaagctccagagactaaaattgaactgaaggatataatgtttccctgcataatttttgtctttcattttgtcatgctttttgtgtccccctttcttcatttagcaaagggaatgtttattccatgtcattgtgatttaggaatatatatatattttaattttattttgtaggagctcataatgaaaggaatgcagtgagcctcagattagatttagatattagacttttaaataaatgaaaattttttgaagtttcactgaatgcattttgtgctatgagatggtcattaaaattgatgacaagaagaggaatgctaagaatgtcagattggcaaggggtgaaattgtggtggttaatatttttaacattactggatatagaataaactcaagtcaaacatctgggaatacttgtgagaggccacctagataactagattaggtaaacagcatacagtcatggattttctgacatccagttgtccattgaagaatgtgactctgtactcacaaatgcatatcacaaacatacatgcatgtgcatgcaaacacatgcacataaacacacatagacacacaacacctgttaaagatatttaaaatatattaaaacttgagaaataatctgagcattggtatacattgctcattgctttccaaatgtggctgcaatgtaacctgctacctaagttattgcaatcatgatttctcttctatgatgtgccttggctatagaccaaaataagccctacttaactaatttcttttctccgggaatattgtggcagcaacaagaaaaataactaatctagtaaccaaaacatcttaatcaaggatgccaagactagtcaattaagaattatgtcttcaacaaacatgagcattgggctgtttagtaatagtgtaagtatttgttaaatactgggtattttgatattattgagttatagtatgaaattgattaaggtggtaaaagtgtattgaatataaattagtacaatgaattaaacataaaagaccttaaatagtaaaaggtgacagtactgataatttttctgacaaagttttcacttttggctttaggctctcaatactgtattaataagtgcctttagctcacttgtaacagcccgttatttctaggtatatttcaccttccagaatcccatgtgctccttttaatgatataagacaaatataaaaatatgtcctaggttactgtttcatgtgtctttttaaaccttgtttctgattaaccaacatcactttctgtcaggcttgttgttttcatgtctcaggaaacccacaggtaagagatgagttgatggttatcaaaatcttgtacataaaatcatagctcttgttttatctaaaaaacaaaacaactaagtacatattactgcacttgatttgatatttgtgtaagtatcctggtaacctgaacagtgaaaaagtataaaatacccatgaataattcatcatatttatggttaatttttttgataaaaaacatcaagagcataaggagtgaaagattatctcttccacaaatggtaatataaaagattagcagcaacaattaaatgtgatgcctattaaaatatataataaagtacaaagtacaaaataaatattcaagaagttaattgcttttcttgcctgatgataatccttaggaacttcctggaaatagtgagttgataaattatatgctttcccttcttgtttacatctaattaagtatgacactgtcatcacttgcagagtgtggctgaaatgatattggtttatacaaaattgtgttaaggatattattggtcttaaatgagatgaacaataattctgtatatgttttgatacattaaatttcatttcaactttaaaatgactaccatattatacaccatgagtagtgcgaacactgagtcagtacagttaaatgtattgctccattggacacctagtggcagatatcattactttttattatggttacttacatatctgcttcatttgcccaggagactaaggtggtgtttctcaactttagttcacattgtaagattttaaccagctgtgtatctttcaatttgtggaaatatgccaaaattgtctattacctaccagataatattggaccctcttctatagttacaacctgatatctgcagacattgtcatatgcacatttaagaacaaattttcttcttgcctgggatccactgctgtaattcataaacttgaaacacaaaaagccttatcccacagataagaaagatggctactgaaaaccatctggaaggtatagcacatccattataagcatgatcaatctcacaactacagtggttgctttgattaggtctagaaaagactgggattgtcaacagctgattatggagattgaagtggagcatgcccctacccttccttgctgaacttttgacaactgatggcttctgggtgaagagatagtcatcatctacagtggtgaacttattgggctccagtgggtattttgaaatgtgaggtcacacagacagtcttgcttaaattcaaatactataaaacaaaacagaagacattgctgtggggaaagaacttgtagagaagaaaaaggctgacagggtgggaaggagataagagaaagcaaggggtgagagtaatcattatacacacatatgaaattgacaaagaacaaatgtaatcaataaaaaagattttaaaaatattagctaaactggcttgaatatgtgcatgcatgaaagctgacatctgcgatatcagtgatccagtgatgctcttctctgtttggcactgttagcaagttcacgttgattcatagatctcagtgttgaataatgaaaatttaaacttagtgatttaaatagatgacaagcacatacagtaatatttaattgacactgaaagttgaagattaaatgtttaagtaaactaaaataggataaaactatatagaaataatgaagtactattcagtgaatgaagagaacagccacagaatgatttatgtaaattctgcatctaggatctgcttctagggtaggcaaaacatttaaatatctttataaatgagaatggcattgtctgaaaattttgagccacgtggtggtgtcctttttgttaaatgtatgtatatatgtatgtatccatcatctatctatctatctatctatctatctatctatctaccatttatctatctatatatccatccatccatctatctacctatctatctatctatctatctatctatctatctatcatttatctagctatatatccatcatccatctatccatcagatatctatctatctatctatctatctatctatcttacatcccagccagtatcccctcccatttcctcccagcaccttcctcagactccctttatttccatatcccatatctactcctctttcctttccattaaggaaataacagatctcacttgagtatcaacaaaatatggcatatcaagttgtaataatactaagtatctccccatgtattaaggctgggcaacgtgacccagtgtgaggaataggattgtaaaagccagtcaaagagtcagagacagcccctgtttccactgttaggaatccttcaataagaccaaggtacataactgtaacatatatgtagaatgcataggtcagttccacacaggcttgcttgttgccagttcatgcactgttgcccctgtaagccccagttagttgattctgttagttttcttgtggtgtccttggcccctttggttcctatcatcctttctccctctgttcaacaggattcccctagctcgatctggtgtttgtctgtgtgtctctgaatctgtttccatcagttgcttgatgaaggctttctgatggcaattgggctagacacaagtctggtcacaagagatggacagttcaggttatgtatggatcattgctcagagtcttagctggtctcatccttttagataactaggagattcccttacactaggtttttacctgaccctgaaacacacacaccctcattttctagtagtttctttcagatctttccccctccattttccccaacctgatttttcatgttcccatttccacctaccctcagtccactcatgaaatctcttctatttctccttcctaggagatccggcaacccctcatgaatcctccttatttagctagtttctctgggtctgtggattgaagaatagttaccttttattttacagctaatatcaactatgtcgataccagctttatttgcaatacccagaacctggaaacaacctaagtgtacctcaatggaggaatagataaagaaaatgtggtacatttacaaaatggagttttactaatctattaaaaacaaggacactaggaaatttgaaggcaaatggataaaactagaaaaaaaatcacactgagtaaaataaccccaatccagaatgacaaacataatatgtattcacttgtaggtggtgaatctctttaatcccagcactgggaagagagaaatgggcagatctctgtgggattgaaggtagcctggtatacagagctagttctaggacagtctgggctacacaaagacaccttttgtcaaaagaaaacaaaacaaaaacaaaaaaacacaaaaacaaacaaaattttaaagaaagccactaattataagcaaaggcagtaatttcagataaacaaatagctccctttattgagtatataaggacttatgtgggaaaaaaatgaaaatcataagatgatcatatctattaaaccatctccaaattaaacacatatgtagatgattcaggcctgttacgactaatgtatataggaaagaggactttagtttaatttttagtattgtcatttaaagcaatctacagattcaatgcaatcccaatcaaaatactggcacaattcttcacagactttgaaagaacaattctcaactttatatggagaaacaaaagacccaggatagccaaaacaacctgttttggaacttgcagaggcatcaccatccctgactttaagctctaaacagcttggtactggaacaaaaatagacaggtagaccaatggaatccagctgaaaactctgatactaaccaacatgcctaagaacacttgatttttgacaaagattgtaaagatatacagtggaataaagaaagcatctgaaactaatggtggggcctaactggatgttgccatatagaagacaccagatagatccatgtttatcaccatgcacaaaatttaaggccaaattgatcaaagacctcaacataaattcagtcacactgaacctcttagatgagaaagtgggaagtacccttgaacaaattggtaaaggagaaagcttcctgaacattacacttgtagcacagacactgagatcaacaattaataaatgggacctcctgaaactgagaagcttctgtaaggcaaaggacacagggagcaggaaggttgtgtaaggggaagaatagaggagagaaaaataaaagataccatcaaagagggagtcagtataggtttaaagagaaatcaggcactagggaaatgtccagagatctacaaggatgacaccaactaaccatctaagcaacaggggagaggctaccttaaatgccttcccctgataacaatattgatgactaacttatatacaatcctagagccttcatccagcagctgatggaaatagcagtagatacccacagctaaaaactgaactgaactggaatccagtagcaaagaaggaggagtgatgagcaaagtggtcaagaccacacccatgaaacccacagacagctgatatgaacaagaggaatctcttggcccccagactgaccactggaaacctgtatggacctgatccagaccccataaatgtgggtatcactgagaaggtctcataaatatatggggcctcttgtagtagctcagtacttatccctagcataggaatgggttttaggatcccatttcacatagagggatactccctcagcctagacggatggaggaaggcctaggctctatcccaaaggatattacagactctgaagaccccccccatggaaggcctcactctcccttgggagcagaaatggtattggatagtagggtgttagtggggtacaggggaggcggggaaggagagggaactgggattgacatgaaaaacaatcttgcttctaatttaaataaaaaacaactaataattcatgttacctagactgtatcatggaagttaatgcatggatacaaagtattaaatgtggaaattcttaataagtggaagatggcttaacttatatctatagaattttagtgtaggcataaatttggtgctagataaatgtgtaacatgttctgtactaataatgtccaatattctgagaattttaccttattaacacacacacacacacacacacacacacacacacacacacacacacacaaacacacaagaaattttaagtaaataaaaaataacatgttccctttgacttttgcagtcatcctgagtgtttcatcccacctccatcttcttccctcagtgtcattgccttctttcctcctcagataaacacccttgtctttcctatttatatccttcctagcatctatgttctgttagccttctctgtagatttcatcttctcacatggtcacttttccctgtcttggatttctgcaattacttcacattacacacccacctcagggatagaatccacaaataagagataacatttagaatttctttctgggtctgggttatcttccttggtatattattttgtaattccatccatttacctgcaaatttcatttctctaaaaagaatttcattgtgtacatgtaacacattttcattatcccttcatgagatgaaaaagatttaggttgtttgcatatcttaagtattgtgaatagagtagcagtgaatatatatgagcaaatatctgtgggataggatatggaatcctttgaacatgtacagcaaaccattttgtaaatctattcctcccaggagatttatagtattttgtcaacatattaaaaaataagacagacatcaagtcaagaacctaagccaccaccttgcaaaagcagagaaaacatcagtcttaatcaaaataaatgcataaataaaataaataataatatttgcagtaatggcaatgaaattaaagtgaaaactacttcatttgttaaaatttgctttctgaaagggtcaataagacagcatgtatttaggaaaggtaaagaatgataaaaaaaacacaaattattagaattggaaaagaagtagtaattattattaatggcccatgcattaggaaaagaatattatgaacatatgtttagaagtttgataacgtacataaaacttaacacatgtagaagtacaacacttgcatctgttactatacaaagaaatttaaatcttcattataaagagataaaggggaaatttgaataggaggtctagatgaggaatggaatgggaggatagaataaaagagggaatatggtgaggtacaattacactcaggttttttgcagtataatttcagttttattatattataaaacatttgttggcatatattaattatacatagtaacgggtttcattatggcatgtacataatgtatttcaatcttattcacctcctgttaccttcctttgtctcctgcttcttttttcctttttttaaaatttgaattagaaacaagattgttttacatgtcaatcccagttccctctccctcccgtcctcccctaccaccacctcccactaaaaccctacctatcacatattctttcttctccccaggagggtgaggccttccatagggattcataagagtctatcatatactttgggatagggactaggcccacctcgtgtcttggctcagagagtatccctctatgtggattgggctcccaaggtccacacctatgctagggataagtactgaactactacaggaggtcctgtagatttccaaggtttccttactgaaacccatgttcctggggtttggatcagttccatgctggtatctcagctatcaatatggggaccaagagctccccaatgttcaggtcagctgtttctgtgggttttaccagcttcgtctggaccccttacccatcactcattctctgaaactggattccagttcagttcaatgataagttgtgggtgtcagtttttaagtatgctataagcaactcccaatgacttatcattaaactcatttttctttggataacgtttttatttttgcagcaaatgacattcaacatggtgacccaaactgttcaagagagagagaataatagaataagagactgtggatcatgtacctaaatgggacaattacagcacaccttctacctttaaatcgtcagagatcattttagaagtgtgggttgaaagactgtaggagccaaaggcagtggataattacaaggcaacagttttctgaacacaacagtgcagttgaaaattgaactcgcagtagtagtgacagtatacataaaaactgtgtaggctcaaggcagataaaatctcagcatggggaggagtaggtggtcatgaagaccacccctagagaagaggtagtttttgttagctgcaagtaaggttctgctttaaggttctctcctagtaggtgaaccatgctctagtgcatggacataccccaggagtgtataggcaccacacatcggacttgatttttaaagaaataaggacacaaagttgaatggatatggaaagctgagtggttctgggaagagttgagagataagatgaacatgacctacacaaaatgcttgaaattttcaaggaattcataaaacaataaaatacttacctcagaaactagaaaagaacatagtaaatattttctaaataagccagcaaatgtatggaaaaatactcatgatcacacttcaaactccacacatgtatttagccaatattgctgggacaattttcatcagaaatttgtttctgggcatacagtgttttgtaccaaacttttccaaaatataattcaagaaaaactttatgggaattttggttcagcttccttacgtgttgtttctacttctttatgctggacagtgatgtttcagatatatattaaatttggcttacacaagatcaggaaggaatttaaacagatttgaaacatttaaactgtgactattttacataagatttgtatttggatttttactgagagatgtgatgcttagcacagtgcttacaattattgttgatatcaattcctgtatctaaaaatctattttggccaatcagcattcatttctggcatactttcctcacttttacgtcacatgcttgtcccctgaaattgactttctaaccccatctgtaggtcatttttgactatttctattttactgtttgtgttacattttaagaatataaaatacgtttggtgaatgaagaataatacaaaaatatcatatgactccttaatggggaaactgagtccaagtacgcatatcctctttgaattcaagggacttatcatgaaatgcaaattgacattatgctaagttctatgtagttcttccaccatagagatcctggaatgtttatatctatagtatttgagtcataggggtgctgggtaagcaataaaagcagaagatatctgatgcatttatcaggatatggaatgcctcctgaatcacttgcttctttatgtgtatcatttgaatgatatgttcattttgcatcacatgtgtgtgagccttctgaaacatatttcaattacagatttgctgtattttgtaaattcagttaatttagtggtaagagagctgttatgtagacctcgtcaataattacacagaagggtctgttagactaacagatgctgtaacagtataaacaaaatgttttgtttagagttctgtttaactttacatatttaattttaataatattttagttgagttatcatcatttatagcactgcaaaattagtttaaaacacacacagcatgaaatttttataattataaatgtatagtgttttagggcacagctacccatgaattgatgagctacaggacagaaaatgctctacaatcagagtagggtctaaatttccagaaagcaagaaaggcaattagatgatgaatgacaaacttaatgaagatatatctcttttgctaaaataaagtagttaggatccacattattagaacagcacactttattttaaataatattgcttttcagattgcataggctattttttcaagatcataataagctctcttatcctatcttagaagctattaaatgtcttcaaagcattttcacctgggttatggccttctatcagaattactgaaaaggtcattctctcaacctacttgtgtttcaaatttattgtttatactcttgttccaaactgcatgtaaaacctacacatctttagacactaactagaaataatggaccagttagtgaaaatcccatgaaataaaagtctataaatatgtcctgtgagctatatttgtccctaaatattttatcttgtgctcatgtagtttttcaatgtgatttaacttgctgatttaataaagtgattttttttctttaaatttcattattgtcaatattccagtaatggcagatttctcaaaatatctgattcctttaaaatagattaacttattgtttgtgtctatgtgtacctgcctatgcatgtgcatattataagaccatgtggaggttcagaggacaacttttaggagttggttctctcttctaccatatgggctccttgggctcaaatccagacttggtggcaatcttctttatcagctaagctatttcaatggctcaatgtgttggatttatattttctttcaaaacaacatgaagattagaaagtggactaactactttatgtaattattttcaaaccatataactgacatctcaataccattccattgttaccccctgtcctacatttctccattatttctgttggttaccttgctatcctagtgttatttgtttcttgtagttttcctgtttgactcatatgataatggaattagttacttctctcatcactgtgtcagattatgtgacagaaacaacctaaaggaaaaatgtttaaaagatggtacacagtttcaggagatgccatccattttgatagaaaagacaaggctgttgaaggttgtcttttccaggcagcatgagcttgcttatgtcacattgaggtggaagacagtaggtagggaacttttccaaacccacaggtcacaacagtctggaaagtctgctttttgtggaccaatatcactagcaatatagaaaggttctatccaaataatgatagtccctggtgttcagtaccacatcacgtcagactgtgggggcacatctcccttccaaaccaaagcaataatctccacggaaagtatagattccctttaaccagcacaaccaagtaaaccacagtctctgagaaagctgctggggataatcttttcacattgaatgcgtttctgttgtcttgtctagtttgagaaacacaattatttcagttttccaccaatgaacccagtcactaatattccaatcagagttgtaacatttacatcttaggaattgttaaaaatgaaaaccccataagacactaagatctacaaaatcaatctttccagaaagaaacacaggagctttttgaaaatgtccttgttgaatgctgctttaagtcattacagcccatgcataaacacagcaatacttcaggcaaaagaacatcagctttgctcttattctactagttagcatcttttcccaaacctgtgcaaaggtattaggaacactgtctagactgatatgtcatggtgcctttcaatggaagcttcatccaactttaatccaccaaagatctgttttctaaatagtattctgaaatacttgatggagctattttttatattgatgatgattaccagctatactgctgattgattgaaattttcaaatgaatgttaatacagataaaacatagtagcaaagaggatcacttattaattgtgatggtttattgagtgtaacatatttttcattccagacctaagtccattctgctaactttcacttacctaaataacactgattccccactctaacctcaatccttgccctgaccattttgtctcttttctctagcttgctaacttgttctctctctctctctctctctctctctctctctctctctctctctctctctctctctctcctctctctcctctctctctcctctctctctctctctctctctctctctctctctctctctcccccctcatctctctctctatgtgtgaatatgctaatgtgcactcatgtgtgtaatttcttttccacgaagctttctttttataagttccttatctgaggtaggaagatatgttactaggtaccaggtagacacagtccccacacaatcctgacagcctgacctaggtccctggaacccctttaaatgtacctgtatatattatccttacactccttcagggagatggctaatgaagataaagagaatagaaactagcctggattgtcctgtgcagaggtagaaacaagagggtctctgtttcaagaaagtaggagacaagaactccacaaaaaactcaagttcacaagtaagtcctgacacttgctctagccccatccctacacacaaagtaaatcaactaaaacaattaaagtcttgactgacattccattatatgaaatagccataagaaaaattaatgattgcaatatgaagggcactgagcatttagttgcttctttttttgactgaaatgaactagcttgtgaacagaaaaaaattatttggagtgtttcctttcccagctttccagataaatttaaaactgattaagtaaatttttgacatggtgttaccataagaaaactggatcagtgagttaatctttgaagctgataaagtttttcatatacaatgaatgaaagatatttatcaaaactagcattttatgaacagtggttagtatgagctattaaaagatagaaaaatgctattctaagattacattttaagtgtttctaatgttttagggttcctttctggtgttttagccagtgaaaacattgaagaattccttactattatttgtgtgtagtatgctgtggtagacacaacaaccaagtggaattacagggagtgattttgatttatttctataattccatttcctacttagaagacggtactcaatctttactttgcattaacatttatagaataaaataattttgtaagaaagaagaatatttgtatcacaaaaattttgtgtgattttcttttccagctattttaagttttcatatttcattctagtaacttaaaaataaagtgctaagcttttcaatagtattttaatgtgatttaatttggaaagacataaactaatattatatgctcaatgtaattactggtatcttcttagtttaaggactatttgtagaacttgcacatattctagaaaaaagggtagtgattattttaattactggctaggtggtccacatactttatacgagatataagttgcaaaatatgttattttacctgtcaaatgctaaataattaatttacattaagttattaaatgctaaatatatatttaaaaactccttccatgtgcaactcagtgttgatgttcctatattcttaaacttcaaattaattcttcacatgcataaggcaggctgatgaaaatatgtacctgtacgaattcttcaagaaaatggggtaagatatgagatgacaaattattatctaaatattaaacattattcatcccattcttttctaaaaaacatgttgtacttttacatatgcatctgtgtctttcaatgagctatgcgctcatgtgtaaggttactgtagaggccagagccattggattccccaggagctagacttgcaaatggctgttagctgcctggtatggatgctggaaattgaactcaggtttttggaagagaaataagcactctttgtttccaaaccgtcactcctgacacagacataattttttccttcataacagagtctaaacatttttttctgctgggaaatttatttattcatttgcttatctattgatgcctgaaccttgttccttgatgtaagccttataagtttcttgcctcattgtggtttaacttttaggtaatatatttatagagaaccatccacttatttcatatttttccaattttagtggattatgtatttagtttatgtcttaaagctcttctgaatttcttagtgactattttaacatagcctttcttgtccccaaatctcttcatttgtcatctctcattttctgttagtttggtaaaatgcttaacctattttattttttaaagaataaactctttctatgttgatctttatataattttcttcatttccatttcattaatttttgatctgagcaagcagctttttcttgtttttctaagcccctaagatacactcttaagttatgtaaggtatacatctaatttgtgtttgtatgtgttcatacgtatgtatgcacaagtgtatatgagagctaaagtgtgtgtgtgtgtgtgtgtatgtggaaactagaggttggcattgaatgttatcctcaattaatttttaccttattcttttagagacaatttctaactgaacttggtgattattaatgaatatcgactaggcggccagcaagtctgaggaattgtctgtctattcctccccatcctgaactgcagtgatgtgttaatgtatctggcttttacacaatgctaagatcctcatgactgaatgaaaaacattttacttactgaagctggtgtctagccatcccactgaaatcttaatggaggctgatattttatactttttttcttaggacagttttcattgtatcaaatagatttaagttcattctcatttgattcatttttttcttttaaatttctccaatgacttattcactgtttaatattgtgttgttaaagttaaataaatttctgcattttctatagattctcttgctgttagcttcttttttaacaccattgtcagagtacacaacttagattttaatattttaataattttaagaacttcatatgacagatcttaatagttttatcagctttattttatttctccctggtcagtattcacctttctagccacacaactttgaattctttcttaaagaaaggaaaatcaaacataatatatggtagccaactactcttgtgtattggtgatgccatgaaatagatcagtgtcttaggggtctgagtattcctttttttcacttgttaaaatttatttgtgttatattacatgatctaatttataaaaggttaaatgggctgatgagactaattttttccattttatatttgaattagaaacaagattgttttacatgttaatcccagattcctctccttgcccccctctactggttcctccccaactaaaatccaacatatcacataccctttctgctccacagtgagggtaaggccttccacaagggatcttcagagtctgtcatatcctttgggataggacctaggtccatccccgtatatcttgggtcagggagtatccttctatgtggaatgggctcccaaagtccacacctatgctagggataagtactgatctgagacaaaaggtcccatggatttctgaggactcctcactgacacccacattcatgggatctggattagtcccatgccagtttccccgctatcagtctggggtccatgagctcccccttgttcagatcagctgtttctgtgggtttcaccagcctggtcagtaccactttgctcatcactccaccttctctgaaactggattccagttcagttcagtgcttagctgtgggtgtctgcttctacttccaccagctactggatgaaggctataggatggcataaaaattagttatccatctcatcatcaggagagggcatttaaactagtctttcctctgttgcttagattgttaatcggtgtcatctttgtagatctccagacatttccctagtgcctgatttctctttaaacctataatggctccctcaattattgtatctcttatcttcctctcctctattcttctcccatctcaaccttactgctccctcatgtcctcctcaaccctcttcttctctgcttctcattctcctagtttcctcttccctcccccatgctcccaatctgctcaggagatcttttccctttccacttctctgggggaccatgtatgtctctctcagattcctcattatttcctaacttctctggtggtgtggattgtaggctggtaatcctttgctctatgtgtaaaatccatatatgagtgagtggataacatgttttgtttttttgtgactgggttacctaattcataatggtttcttctagttccatccattttcctgcaaatttcaagattccatttttttccactgagtagtactccattgtttaaatgtaccatattttctctatccattcttcagttcagtggcatctaggttgcttccagattctgggtattacaaatcatgctatgaacatcatagaacagatgtccttgttgtatgaatgtgtttcttctgggtatatgtgtaagagtcgaattgctgggttttgtagtagattgattctcattttcctgaggaatcaccatactgatttctaaagtggctgtaggagttggcattctcaccagcagtggaggagtgtttccctatctccacatcatctctggcataaactgtcattggtgtttttgattttagccattctgacaagagtaagatggtatctcagagttgtattgatttacatttccctgatggctaaggatgttgatcactttcttatgtgtctttcagccattttagattcctccattgtgaattgtctatttatttctgtaccccactttttaattggattatttggtgttttggagactaccttcttaagttctttgtaaattttggagatgagccttctgtcagatgtggccttggtgaatgtcttctcctgatctctgggctgccattttgtcttgctgactgtgtcctttgcctgacagaagtttctcagtttcaggaggtcccatttattcattgtcaatctccatgtctgtgctactggtgtaatgttcaggaagcagtctcctgtgtcaattaattcaaaggtatttcccaatttgttttctaatagattcagtgtgactggatttatgttgagtttttccatccattcagacttaagtattgtgcatggcgatagatatgggtctatctgcagtcttctacatgccagcatccagttatgccagtcttttgtttttccatataagttgagaattgttctttcaaagtctgtgaagaattgtgccagtattttgatggggattgcattgaatctgtaaattgcttttggcaaaaatgccatttttagtatgttgatactacctatccaagaacatgggagatcctttcattttctggtatcttctttaatttctttctttaaagactcaaaattcttatggtagaggtcttccacttttttgtttatagttattccaaggtattttatgttgtttgtagcaattttaaagattgatagttctctgatttctttctgtatgcatttatcatctgtacgtaatagggctactaatttttttgagttaatcttgtatcctgccactttgctgaaggtgtttatcagctgtaggaattccctggtagagtttttcaggtcacttatggagactatcatatcatctgcaaatagtgaaagtttgtcttcttcatttacaatttgtgtccccttgatctctgtttgttgtcttactgctctagctagaaatttaaggacaattttgaagaggtatggagagagtggacagccttgtcttgttactgattttagaggaattgcattaagtttctctccatttaattgatattgactgttggcttgctgtatattgcttttattatgttgaggtatgttcctgttatccctgatttctccaagacctttatcatgaaggggtgttagatttttctcaaaggctttctcagcatccagtgagacgatcttgtggtttttctttctttgtctatttatatggtggattacattgatggattttcatatgttgaaccatccttacattgctgggatgaagcctacttgataatgatggatgatttctctgatgtattcttgggtttgatttgccagtattttattgagtatctttgcatcaatgttcatgagggatattggtctgtagttctttttcttagttgtgtctttgtgtgtattgggtaccaaggttatagaagccacgtaaaaagagttttgcaatgacctttttgcttctactgtgtggaatatttgagaagaattggtattacctgttcctttaatttctggtagaattctgcactaaagccttctgtggccctggggtttttttggttgggagacacttgatgactgcttctatttccttaggtgttatatgtctatttaagtagcttatctgttcttcatttaattttggtaagtgaaatctatctgaaaattgtccatttcctttagattttcaaatttatgaggaatacaggttttcaaagtaggaccagatgatgctctggatttcctctgtgtctgtggttatctcccccttttcattcctgattttattaatttgcatgttcactacctgctgtttagtaagttggataaaggtttgtctatcttgttgattttcttgaagaaccaactcttcgttatattgattctttgtattattctcctagtttccactttattgatttcagccttccttttgattatttcctggcaactactcctctggagtgtattgacttctttgttttctagagctttcagttgtgctgttaattctctagtatgattattctccagtttcttcatgtgggcgcttagcgctatgaagtttcctcttaacactgctttcaaagtgtcccataagtttgggtatgttttgtccacattctcattgaattctaggaaatctttaatttttttatttcttcctcatcccaagaatggtacattttggtgttttccaatttccatgagtttgtaggttttttgcaatttgtgttgttgttgaattctaattttaaagcatggtggtctgataagatacagtgggttattttaattttttgtacatgttgtggtttgctatgttgccaagtatgtgttctattttagagaaggttccatgtggtgctgagaagaaggtaaattgttttatatttggatggaatgttctatagatgtctgttgaacccagttgggccataacttctattagttcctttgtttctttgtgaagtttctgtctggtgttcctgtctaatggagatagtggggtgttgaagtcttccggtacaagtgtgtgagattttatgtgtgatttgagtttattaatgtttcttttatgatcttttatgatcgtggatgtctttgtatttggggcatggatgttcataattgagacttcatcctaatggatttctcttgtgatgagtaggaagtctaatttgttggatattaggattattaccccctcttgtttcttgggtccatttgattggaaaatcttttcccaacccttaattcttaggtgcaatctgtctttgaaattgaggtgtgtttcttgtatgcaaataaagatggattctgtcttcttatccattctgttagcctgtgtctttttataggtgagttaagaccattaatattgagggatattgatgaccatctattgttcatttttgtttgttttggatttgttgtttttttgtggaattgtgtgtagatttccaccacatttttcttttggctgttggtaaagtgggattatctattgcctatgtttttctggttgtagtgaacttcactgggctccaattttccttccagaattttctgtagggctggattagtgaatatgtattgtttgaatcttgttttgtcatggaatattttttctccatctatattaattgaaagctttcctgggtatagtagtctgggttggcatctgtaatctcttagtatgggtagaatatctaaccaggatcttcttctggctttcagagtatccatggaaaatcatgtgtcattttgattggtttgcctccatatgttccttgacctttttcctttgctgctcttaatattctttctttattctgtatgtttgggcatttgattattatgtgatgaggagacctttttatgtggtccatgctatgtggtgttctgtaggctccttgtacttttattggcatgtctttctttaggtagggaaagttttcttctatgattttgttaaatatgttttctgctcctttgagttgggtttcttcacctttttctatgcctattattcctaggtttggtctgttcatggtgtcccatatttcctggatattttgtgctaaggattttttggatttaagattttccttggtttatgagtccatttctcctattgtatcttcttcaactcctgagattctgtcttccatctcttgtattctgttggttgtgcttgcatctgtacttcctgatcatttacccagcttttctatttccaacattccctcagattgtactttctttattgtctctattttggtttttagatcttaaactctttcctcgagagatttgttgacttgttgtattttttggttttttttttcttccatttctttaagggattttctcatatcctctttgaggccctctatcattttcatgaagatgtttttaaggtcattctcttctgcattatctgcattgtgatgctcaggtcttactggtgtaggttccctagactctggtgatgtcatattgttttttttttctgttgttgaacatcctttcttctggtgggtgtagaaggagtctcttcctctcctggtgggaatgggaccaaggttcccttctgatagatgcaaaaaaatctaatactctgatgtctttcctcttctcgtggatagaggcaagactggtaccagggccttggcagtctctgggtgtgttggatcctgcaaaaatgggatcctgtgagcacttccctggcctcaggtgtccccaagcagggcaggagaagccgagcctgaaacagccccaagcctacctgatgagaaagatttttattatgaaattattatgttaaaggctccatagatatctgctaaattttacttgatctatgatgccatttaatgtacatacttctctgtattttgtcagaactacctatgtgagagaagggtttggaagtgagatactattagtgctacaggtataatctctgtctttacatccaacattatctgggtaagtatgcattggatggagcaatactaaaaattgcagtgtcatctcttgacagatttttatattcaatgtacgaagtgaacttgcatctctcttctaattttggtttaaagtatttctgtcagatactgggatagtgatgctttctttttcctagtttcatttgcttggaatatattaattcgactttgatcctgtggttgtatatgtcttgataaggtatgtatcttgaaagcaacaaatatgtggatcctgattttgaatgttgccttctagttattcttttgattggggagttgacagcattaatcttcaaagttatttttttcaaacttttttatttgaattagaaacaggattgttttacatgacaatcccggttcccttctcctgccagtcctctcctacccgcccccaactaaaaccttatctgtcacatatcttttctgctccccctggatggtgaggccttcgataaggtgtcatcagagtctttcgtatcctttgggatagggcctaggcccacctccgtgtgtcttggctcagggagtattcctctatatggaatgggctcccaaagtccacacttatgctagggataaatactgggctttgaaagttgtatactaaatgctttcttttttctattttagtgtagcctattttctggtagcttcactaatatttttatctgtcttttgctctgaaagacttgtgaattccttttgtttctccttttatcttttgtaattattgaatttttcttcagttatagttgatagttttcttgggtgtaagagcctaggttggtaggaactttcagagatcaagatattccaagcccactcttgttattctaagtgcttgtctttacatatgacatttcatttttacttatatcattttgttctgtatattttttcttattataatatgacacaggtgtattcttttctgttgtctgtctctagatggttatttctttacctagatttgggaaattatttgtgatgattctatggaagtattttctatgtctttctcctgtaattcttcatcttcttattttatgcttataatatacagatttggaattttatactatctcatgggtttcaagtattccattcatacactactcatttatcattttctttagctaaaccttccaactactttaccttacttttaaggcctgatggtgtttttcccttgatctttacttttggcgaggatttctatagacctttttatttcagtcattaagttttttatttttagtattttacctggaaattttaaaccatttgtctatttactaaagtctactttcatatcttatgtttattatttactcatttcattcaactattttggaagccatttgggattttacttttgtcctttggtttcttggaaaatgcttcacccattcagatgtatagtacaaataccctgatattttccttgcttgtgcatctgcatcagagatatagcccacctgatcccagcttttctgtacacatgtctgccattcctttgttactggttgactcagttgtgtgaatccctataacttgcatattgcagcagtgattttctgcaaatactttttcaaattgcaaaagtaaaatatgatttgaaagttcataaaaagataatatatactcctcaaataataaaaaaggtagtttttcttatagtaagaatggcataaatttaaacttttctcaagtttcactcaaatgcagaagatcaaaatgtttatgcttactttggtagctctccaagatagttctttaaagtgatatgttagctttaagtaaatatttagtaagaagaacacaaattataagtggattttgagagctcatcctgaagaccacatttaggaataataccacaattatatctgtacccatgtgaaataatattctgtgggctaattttgatgagcaaatacagttatgttcaacctgttgcttaaaaaccaatgtcttctgtagctactgagttctatacctatcctatctgacaggtatgccttccatattggcagtgctacgtattctgaacattacatatgacagatttatttattttatcaaaagaatggcattgacactcaacattactcatcattaaaaaattaaaaattaaagctgcaatgaaatgctattatacagctagatgaatgttaaaaaccccaactcccaagatgtggcaattgaacagaataagatttctgaaggttaaagggtaaaacagcttatttggaaaagtttgacagttttcaacatgggtaaccacaaaccaacatcctgataactccatgtcttagtcattgttctattattgtgaagagaaattgtgatcttataaatgaaagcatttaattgagtgcttgcttgtagcttgagagggttagttcataatcatctatcatattatagtgggaagcagacaaacacggcactagagcaacttctgagagctttacatactgatccataggctgcagggagagaagagacattagggttggctggcatgaacttttgaaacctcaaagctcactcccactgaagcaccttctccagcaagacagatctactccaaggccacatctcccaaaccttaccaaacagtttcactaattagtgactaagcattaaactatatgagcctatgcaggtaattctcattcaaacaacaacactcaacttcaggagaaattgtaacacatcacaaaaaaaaatttgtgagaatatttgtgacagattcattcataatccccaatcagaacaaattcagaattccatgaactgatgagtaagcaaacagaagtgtgtccaagatgaaatactgcagctcttgtaggagaacattgacacaatatattctataaatgaaattgagaaaagtacttgctttatcacacttaaaataattctagagacaggggaggctcctaaaacaaaatcataagagttcagtgtgatgtcaaaggatcacatgctgcctttctttcctgctatatattgcttggactttgtttcttcatgggtcctctgcaagtgtttcaattcctaccctcacctattcattctaggtcagaagaaagagaaagtgcaggaaatattaattttgaacatgccaggatctgcctctggcaaggattgacctgcagcaatactaggtaaacactacacccctaagcagtaaccctcaagcatctttttagttttagaggcatgatctcaccaaagttgcctagaatagctttgagattattttgtgcccccccccaggctttaaattgtcacctttattcctccaattcctgagaagctgggattgcatgcctttgccacctcctttcctctctaagtatcattttgttgtataatttgcatttcacaaaactgatcaaatttaataataatatttagtattttgggtgaaatgttcagaaatatcattcatctattactacagacattataacatttgcttcacactaggaagcttccttatgccattttcagtaaacttctgccagcaactatattgtcagggagttactaacactctaaatcagatttatgtgttctggacatttcctgcacacagaattgtacaggatggagtctattgttttgatctttttaacttagcataatgtatgtgtttatctatttcataacacacaacaaaaaagacatagacaagttccagaagtccattttaaggtcaatagaaacctgagggacagaatgattaagaccacagggtagagtgaacaacagagaaaagtggggcactgagaatggcagggtgttgataaagacagacagtggcagcaaattgattgaattgtaagctctcccagagatttgttattgtatagaataaatactccttgtagcaaaggatgctgcataaaagcacatcaccatgtcccgtggaaaccctgtgtcttcctgggataacagaatgagtgcaatgtgggtttattcacatacaaacaaggtgaggaaagaactggatcgcagtcttttgttccttcaatttaatagcttaaactaatttagtaaatataatcttattattggagcaccctgaaatagcagcaaaattagtccttacagatatgctaaaagatgtttaaattacccaggtatcagaaaggggaactgacagtcagagttattatatgcttgaaaatttgttgtaaacatttcacaattcctgatgaagaataaagaaagctaatccagtgcaagaacactgtagcattttgtggagacagtcttctcttaagaagaaaaattactgaggaatgatcagaaaagggaaacaaagtacacaagaaagtcataaatcagagctcagtcactactgtaccagctacaagtcaaaaataatggggaaaaaaactgagagggtgataactggaaagaatcaggaaatacacagtttacattaagaaggaaatccaaactgaagttgaaatacaaaaacaaaaatttcaagtcacaacctcattagtcaacctcatttgtaggatgaaagtttgaaaggcaaactaaatttgtgaaaataataatcaaaataatataaataaactaagtataaatggtttaaatggactccttaaacattacaaatgattaatctagaataaagatattatcaattgtagaaattcaagtacacaaaatctacaaaagttttggaaactaaaggctgttagaaaaagagtaggcaaatactcacaaaggtttgtgaagatgaagtataaaaacatttaactctctatagtaaaaagatgtgttgtggtaaaatgaatgtcaactgagttagcggttttcttattcctaaatttcaaaatgagtgctgtcagatcagatcatctcatctctaaatatttgttttattttctactcactcattcatcacagcattgatagcacttgagactgtacccaagcaacatttttctatgtagattggaaaatcattttctctttgctgccacgattttataagaattttgcacatatttaaactttaatttataggttttcgggcatgtttttctcagtttagaatgtgcacactgtgtttgcacatgccagtgtactagacactacagatgctgaccagagagaaataactatgatataacaatagctaacagatttgttttttaattgatgattatgttccatatctcaaataaattttaacttggtataatgagtaaataaatgtgagcacagaacattgagcacttgttcactcataaacctatctatctattagatttgaatagtgtccatcataacacactccaatgtaatgaattatgcataatataaaacatatttgcagttaaatcagacaagtataagagagacagaaaggattacagacaaaagacatctgagttgacttatcatatatatatatatatatatatatatatatatatatatgtgtgtgtgtgtgtgtgtgtgtgtgtgtgtgtgtgtttgtgtgtgtatacatgcatatgcacatatatgtacttttaaatatctcccaattcttgaagcaaaagaaatatactgaaatgctattaattgaaaaatggtattagaaagttaattgatgtttaaaaaaataaggaagcctttgctagagagacaggatttctagaaaaaaatgtgaaagtatatttgattattttggtggaaacataaatactatggctgatgatttgttcctgagattagaagctcttcatgtaaagcctgaaaacctgaccccagtcaggatacacatagtggagagagaaaactgccttgtatctgtgtcacattgaggaaagaaaataaagcaacttcctcttggattatcttaaccaagagtgagcataaatttgaaatctccacttcgccccatgtctcccaactgtctataatctactgtttctagcttatcagtggtctatacattgtgtctgtccctttgcctatggctgttccttctctataggtttgcatgtgaatgttttgactctgtacctgtatttattttcatgtatattagtgtcagaaatctctggtacctgctgcaaacaaagggctttgctctccatctatcaacatcacaaaaaaatgtggtcagggaaggaaattgtggcttctttacagaaatcgtcaacggtagtttataagggaagatgtttctttattgacatcaactgacccagaatactatgaagaaaaccacagcgaggctaccaacctatatccttatgtagttttcaacatttatgggatatttgttgcttaaagttaattttaacctgttgtatacattcagtaaattattagcataatacatgcctgcattactctggctcaggggcatagaaggccacataactttaaacctaagctacatatttatcttagattataaaatatgagtgcaggaaaatgcaagacctagtaagttggttacatgtttttaaagacaggttaaactttaacaagttgagtacaggacagcatgttaaataatagtttttttcttttaattagatgtattttacatcctgaacacagtttccactaccttctctactcccattgcctctcctgacctctattttgtgccccatccccaaatccatcatcttccttttctgctcagaaaagggcaggcatcctatggatatcctcaaaacatggcatatcaagttgcagtaggatgaagcacttccccttgtattaaggatgggcaggacaatccagtgtgagcgcttggtctctaaacccagacaaagcaatagggaaagtccctgcttccgcagttagaagtcctgcgagaagacccaactagacaactgtcacatatatagaaagggcccaggtcagtccctcccatgcatgctccctggttgctagttctgtccctatgaggccgtacaagcccagttagttgattctgtaggttttcttgttacgttcttgactcctctgactcttataaagctccctccctctcttcagcagggttccccaagttctgcttaatgttttggtgtgatcctcagcacatgtttccatcaattgctggatgaggactttctaatgacagttgggatagacatcaatctaagagcataacataatatcattaggcatgattctgttgacatgtttttctccaaatgtgtttggatatgtcctaggtctcagggccatccagattatgggtttggcattccagcctgtgtcaggtatggtctcactcctgtggcagggttcctatgctggggcagtcactggttggccattcccacaagccctgtgcctcccttaccctagcacatcccataggcaggaaaattgtaggtcataggttaagtggctgggttggtgttccaatccctcctctggaagttttgccaggtcacaggataaggataattcaggctacatatccactactgctaggaatctgatctgggctcatcctagttgatttcttgtaccaggcttctacctgacctcaaaacgactctcctttccagccatctctttctgtattctccccttccatccaaccacccccacccccaactgattcatcacacaaatccccagtgtacaaatccccttccctgggaggtccttacacccacccccctcactttatgtcatacatattacctagcttctctggtctgtgcattgtagcatgattattctttactttacatctaatatccacttatgagtgagtacataccatgtttgtcattctggatctctgttacctccttcacgataattttttttctaatcccatccattttccttcaaattttatgatgtcactctctttaacagctgagtaatactccattgtgtaatgtaccatattttctttgccagctcttcagttgaggtacatccaggttgtttgtgggttctggctataacaggtaaagctgctatgaacattgttgaacaagtgtccttgtggtattattgagcattcttcggatatatgctctagtgttatagctaggtcttgtggtaaatcaattcccatttctgagaaatagacttattgagttctaaagtggttgcataaatttaaacccatgtaggggaagctgtagccacgcctacttaggggctggctacaggtgtgtctgactacgcttgcttgcgagggcgtggtcagggtgacttagagtgaggctttcaggggactgtgtttctctttcagtttcacttttgtacttgaagtacagactgctgccatgctggctggctaggttgctctgtaagtaaggcttttccctattaaatacccttatatttctatgtgactccgtgttggtaatttctcactatatctggttgttaggagcaggatattggaaacctacaccccatttgggacaggctgtgggtcccaccgggcctgcagccttggcgggggggggggggtccctctcttcacaggtgttcccagctcccagacaacccgctcacaggaccaatagatagttctttgcctattgtgaaaaatgatactgctctagatggtagtttgaatagtgatgaagaatcaagtgtgaatggacaaaatgagaaacgcatattttggcaagcttctattaatgataaaaggcctcagttgaaagtgaaaattaataataaagttatttctggcttagtagaccgtggggcggatgtaattattattacccaaaaatcttggcctcagaaatggcctcttagagaggcaaatgtacaatttttatgaattggaactctatctagagttctacagagtgttaactcagtggtctgcattggacctgaaggacagaaagggatactaaaactgtatgtggcagatatagctataaatttctggggtcgtgatctcttacagcaatggaatactcagattaatattcctccaatgtcagatataaattatgtacaatctttagatagtagaaaagatctggcaagacgctatggaaaacagttaccaaccatccatgctgtacagtaactagatacaaatgatggaccttcagaggagccaaaggccctgccattgaaatggcttacagatgaacctgtttgggtgggacaatggcctatgacatctgagaagctagaggctttagaaaagttacaacaggaacagctagacactgaacatatagaggaatctaccagtccttggagttctcctgtatttgttatcaaaaagaagtcaggtaagtggagaatgctgacagacctgagagccataaataaggtaattcaaccaaagggctgtctgcaacctggaatgccattaccttccttaatacctaaaggatggcctatcatagtcattgatctgaaagattgttttttcacaataccattacaggaaaatgatagagaaaaaacttcatttactgtaccaactccgaataattcacagtcagttaggagatatcagtggagagttttgccacaaggaatgctaaatagtcctatgttgtgtcagcactttgtacagcaacctttggaaataatccgtaagaaattttgacaatctcttgtttatcattacatggatgacattcttttatcagattctaataaggaaactttggaacatatgtttgaaatggtgaaggaagttctgcctcgttggggattacagattgccccagaaaagatacaaagaggagattctattaactatttagattacaagatagacttatagagaatcagacctcaaaaggtacaattaggagagatcattatcaaactcttaattctcttcagaatttattaggggaaatttctcaattacagacgattattggtgtagaaggacatgacttaaagcttttaaaaatggaccttaaaggtgataatgacctaaacagtctgagaatattatctgctgaggcagaaaaagagttacaacgggtagaaaacagaatattggatgcacatgtagattggataaaccttgatttagactgtatactggttatcttgccatgcagagaatacccttctgggattctgatgcagagggaagacattatattggaatggatatttcggccacataaacagaataaaaagttaaagacatatattgaaaagatttctgatttgattttaaagggaaaattaagacttcatcaactgactggaaaagatccagcagaaattatagtacctttaactaatgaggaaatttcctccttgtgaaaagataatgaatattggcaaatatctcttactgacttttgggggacaattagcaacaactatcccaaaactgatagaattaaattcataaaaaagacagtctggattcttccatgtattgtaagacaaactcccatttctggagttcttaccttctacactgatgccaacaaatcaggtaaggcaggttataaagcaggtgaggtaagtaaagtagttcaaagtccatatacatctgtacagaaggcagaattatatgcaattctcatggtacttatggattttacagaacctcttaatatagttactgattctcaatatgcagagagagttgtgttacacattgagactgaagaatttgtttctgataatatagaattaacttctctgtttttacaattacagaaaactatcagaaacagaagtaatcctatatatgttacacatatcagatcccatatgggtctgccaggcccactagcacaaggcaatgatgagattgattgtttattaattggaagtgtgctagaagcctcagaatttcataagaaacatcatgtaaatagcaaaggtttgaaaaaggacttctccatcacttggcaacaggccaaggaaatagtgaaaaactgtcttacttattccttttataaccaagctccattgccagaaggttgtaatccaaagggcattcagagaaatgaagtttggcagatggaagtctttcactttgcagagtttggaaatttgaaatatgtgcatcatactatagacacattctcagggttccaatgggctactgctcttaactctgaaaaagctgattctgttgttacacaccttctagaggtgatgacagttatgggtatacctgcacaaataaaaattgacaatgctccagcatatgtctctacaaaattggaacaatttttcaaatataacataaagcatgttaccggtataccacacaatcctacaggacaagcagtggttaagagatctaatagaacacttaaggagatgctcaacaaacaagcttggaagactaaaccccccaaacacaggttgcataatgctttattaaaagtaaactttcttaatgccaatgaaaaaggacaaacagctgcagaaagacactggactacggaaaaaaactgctgaactcaatcagccggtatacttcaaagatgtactatcctctgtatggaaaccaggatatgtgttactttggggtaggggttttgcattggtttctacaggagaagaaaaactttggataccatcaaagttgatctagattcgagttgaaaaggaaaaacctctcgacgaggagaaatgacaggtatatcttataaactaaatagaaacctcccaaaggagagggatgtgttttgcttttatcttcacaggaaaactcatctccagaaggcaaaggacactgcatgggtagatgcttaagaagaaaaggtagctataaccatcaaacaaaaggaacacgccatatggtaaactttacagctgcctctcagagaactctatttctgtttatttcctagtccctattcaattaaaccaatgctggatttaaaggtggatttggctttcctcctctaaaatccaagcacattatttaactaaactttagagtttctgtattgtatcaagaagccaattgatgtaatacagaatacaagaaggatttggggactgtctttgtattttcttggatctttctctcaaggtggacaccctctcataattgttatgctctcatggttttattccccagcatgtgtacatacacaagcaaacatttctctgctgtttatatttgagtcccacacagccaatgaagacctgcctgtcagcaatccctggacacccccggaaagaaaatgggccacacctcctcgactgcattggatccaacttgctccatttcaactgacactctggccagaggttcgggtactgtcttcaatcaagttgaggatttcaatcgagatcttctatcaagagactccatctaacatagactggatacaatccattcaagacttttactacactaacatccttcccagcccaagcggtcacttgtgtttttgattttagccattctgacaagtgtaagttgaaatctcagagttgttttgatttgcattttcctgatgactaataatgctgagtatctatttaaatgtttaatggctgtatgagattctactgttgagaattctctgggtagatctgtaccccatttattaattggattatttactttttatgtctagcttcttgtgttttttatatgttttgcatggtatcactttgtcagatgtggggtttgtaagtatcccttcccattctataggctgtcattttctcctgttgatagtgtcctttatcttacagaagctttacaatatcatctgagccgtttattaattgttgatctagagtctgtgctaccagtgttctattcaggaagttgtctcctatgtcaatatgttcatggctattctttctttgtcttctatcatattcagtgtaactgggtttatgttgagttctttgatctattcagacttgagttttgtgcagggggatagaaatgaatccatttgcattctacattccagttagaccagcacaatttgttgaagatacttttttttttttgatttccattgggtaattttagcttctttgtcaagaatcaggtttacataggtgtgtggacttgcatctgggtttttgattcaattccattgatcaatctgtctttttatggcaatcacatgatatttttattactatcgctctatagtacagcttaaaatcaggcatgatgatgtctcaagaaggtcttttattatacaggattttttttgctatcctgggttttttcccttatgatattgagtattgttctttcaatgtttataaagaattgtgttagaaacttagtggggattgctttgagtctgtagattgcttttggtaaggtggccatttttacaatgttaatcccattctaccaatccatcagcatgggagatctttccatcttctgatatcttctccattttctttcttcaaagacttgcttggttagagttatcccaagatactttatattacttgtggctactgtgatggacatttttcccctgatttctttctcagtcagtttatcattagtgtataagagggctactgatttttttgttgttgttaatctttatctagccacttcacattaaaggtgctcatcagctataggagttccctgatataaattgggggctgtttatatatagtattatatcatctgcagagatactttgatttcttactttccaatgtatccatttgaaatccttcagcagtcttattgttctagctagtacttcaagtactatattgaatagacaagaaagagagtcaaaaaccttgtcttgtgcctaagtttagtgaaatcacttttagtttctctccatgtaatttgatgttggctgtcagctcgtatattgcttgtatacctgatctccacaagacttttaacatgaagcagtgttgtattttatcaaagcctttttcagcatctaatgagatcgttgtcatttttttctttcagtttgtttataaggtggattacattaacagatttttgtatgttgaacaatccctgcatttcttggatgaagcctacttcatcacagtaggtgatcttatttatatgttcttggattcagtttgcaagtattttattgagtatatttgcatttttatcatgagggaaactgatctgtaattctgtttctttattgaatctttgtatggtttgagtagcagagtgactgtggcctcataaaaagaaattttcagtgctctttctgtttttattttgtagaagaatttgaagagtattggtattagctcttctttgaaaatctgctagaattctgcactggaaccatctgaccctgggctcttttagttgagagacttaaaaactggttctgtcaccttaggggttctagatctacttaattattttatctgatcttaatttggttttgctaagtggcatccatcaagaaatttgtatcttttagatttttccaattcagtggagtacaggttttttaaataatatctgaagattctctggatttcctcagtgtctgttgttacatccacccttatgtttcttattttgttcatctgaaaattctctctgtgtcttttagttggtttggataaggatttgtctatctcattgattcaaagaaccatctctttgtttcattgatttttttgcattattctttttgtttctattttattgattacttcctgctgtctaatcttctgcagtgtgctattaagtaactagtatgagatttctccaaattctttatgcaggcacttagtgctatgaacttttctcttagcaccactttcattgtgtcccaaaattttgggtattttgtaattcaattccattgaatactaggaagtcttcatttttttttttaaatttcattcttgacccagtggtaattcagttgagagttgttcagttttcatgagtttgtaggctttctttagcttctattgttgttgaaatttagcattagtccatagtgatctggtaagatacagttttttcctgtctattgagacttaccttatgacagagtcagttttggagaaggttccttgtggtgctgaggagaagaaggtatattcttttgtgttacagtaaaacattctgtagatatcttctaggtctacttaagtcaaaaattctgttagttctattaatgctctgttcattgttgttttgtcagaacaacctgtccattaccgagcatagggtgttggggtctcccactattactgtgtgggatttgatgtgtgatttaagctgtagtaatgttaccttttaaaatgtgggtgcccttacatttagaggtatagatattcagaactgagacattatcttggtagatttttcctttgatatgtatgaaatatccttctccatctattttttaataaatttttgacgtctattttgttaagtgttaggatagctacaccagcttgcttcttcaatccatttgcttgcaaaatattttctacccctttactctaaggtaatgcctatctgtgatgctaagatgtctttcttctatgcagcaggaagatggattctgttttcgtatccattctgttagcctgtgtctttgagtccagtgatagagatattaatgaccagagattggtttttttgttgttgttttttctcaattttttatgtaaattataaacaagattgttttacatgtcaatctcagttccctttccctcccctcctcccctgctaacaccctacctatcccataccatttctgtccccagaaagagtgaggccttccatggggggggttcttcagagtctgtcatatcgtttgggatagggcctaggccctcccccttgtgtgtaggctaagggagtatccctctttgtgaaatgggctcccaaagttcattaatatgctagagataagaactgatctactacaagaggtcccatagatatctgaggcctcctcaatgacacccacattcacggggtctctatcagttccatggtggtttcccagtgatcaggctgggggtcaagagatcccccttgttcaggtcagttctttctgagagtttcaccagcctggtcttgaccccttggcttatcactcttccttctctgcacctagattccagttcagttcagtcttagctgtgggtgtctgcttctacttccatctgctgctggatgaatgctctagaatggcatataagttagtcatcattctcattatcaggagagggcatttaaggtagcctgatgcttatatgataagttggtgtcattcttgtagatatctgtacatttagctagtgcctgatttctctttaaacctatactggctccctctctgatggtagctcttattttgctctcctctagtcttccccctacacaaccttcttgctcccttatgtcctcctctcccctcttcccttctcattctcctagctcgctctcccctaccccagttctcccaatttgctcagcagatctagtccctttccccgtctctgggggaccatgtatttctctcttagattcctccccattgcctaatttctctggttgtatggattgtaggctagtaatcctttttctattgtaaaatccataaatgagtgagtgcatgccatgtttgtctttttgtgccagctttaactcgctcagtgtggtttcttgtagttccatccatttgcctgtgaatttcaagattccattgtttgtttttttttcccactgagtagtactccattgattgaatgcaccacaatttctctatctattcttcagttgaggggcatctaggctgcttccagtttctggctattacaaatattgctgctatgaacatagttgaacagatgttcttgttgttgaatgtgcttcttttggatatatgctgaagagtggaattgctggatcttgtggtagactcattcccattttcctactaaatcaccatactgatttccaaagtggctgtacaagtttgcactcccaccagcagtggaggagtgttcccttttctccacatcctctccagcataagttatcattggtgtttttgattttagccattctgactggagtaagatggtgtctcagaattgttttgatttacatttccctgttggttaaggatgtaaggaatttttttcttgaccagggattgttaattcctctttcttttttgttttgatggtggtgatgggtgtgtgtgtgtgtgtgtgtgtgtgtgtgtgtgtgtgtgtgtgtgtttgggttttgcctgtgtgagattatttattgcttgtgttttcctgggtgtagccaacttccttggtttagagcttttgctctagtgtcttttgtaggggcagatttgtgaataatagtatttaaatatgtttttgtcatgaaacatcttgttttctccatatatggtgattgaaagttttgctttgtatatagtctggattggcatctgtggtctcttagattccacaagacatgaatcctggcccctctggctattacagtctctgatgagaagttatgtgtgattctaataagtctgaatttatgttacttggatttttttccttgcaatgttaatattctttctttcctttgtatgtttagtttttttattattatgtaatataaggattttcttttctgattaaatttatttaatgttccctaagcttcttgtatctttgtgggcatatccttctttaaagtaggaaattttttctatgattttgttaaatatattctctgtgatttttgctaggattcttctccttgttctgttcctattattatttgatctttccatattgtaccagaattcctggatgttttgtgttgagattttcacagattcaacattttcttggaccaatgaatctttccttctaacatgttttcaagtgcctgattctatcttccatttcttgatttgtattgctaatgattgcacctttagtttctgttcaattacccagattttccatttctagaattcccttacttttgttttctttattttcctactttgcttttcaggtctcgaatattttctttcacctgtttgtttgttcttggttttcttagcattctgcaagggttttattgatttcctccaattttttggttgttttatcctcaattctttaggggagtttttcatttattctttaaggacttctataatctttaagaagtgttttaaaagtcattttcttgtgtttcaggtgccttggaatattcatttcttgctgttgtagagtagctggggtctggtggtatcttttagtgtagtaagcattctcattagactttgcagaaccaccatcctgcaagtaatgatacagagacttcttattaattacaaagcttagccataagtttaggcttgtgccagtagctcttataacttaaattatcctgcttttattcatctatattctgtcatgtagctgggttaactctactctctaccatatgtccaacctcttcagtctctccctggcatatagttgcgagctggacttctggtgggtagcttggcttttggcacagcagtgggtatctcttcttctgactggtgtgacctgtttttcttatttttctggtaggtatctcttctttcaaatggtgaggactataattaaactgaagaaatctgcttctccaattggtttgcactacaaccaagcagtggaattctgccagagttgggggcagggctcagcagtggtatatgtcctgagatgggagtggggctattggatgtctgctggggattaggaactggggaatagatcacctggcttgaagacagatcaaacacccgttcttccaattggtgtggcctgtacctgagccaatgaagtttattcttccaactggcctagaagacactgttggagaatatttgctcaaatctttgaagatgtggtgcatttgcatacctgtgtaagtaagtgttgcattcatttaagtatgtaaagatgtgctttatttgtttatgttgtagaatgtttgtataaatatggaaagatatattgtgtttgtttatgttgtggaatgtctgtttaattatgtaaatctgtgttgcatttgtttaactatgtaatgatgtgttgttgttttacattgcctgccttaattacctgactgtctaataaaaagctgaatggccaatagtgaggtaggaggaataggcagaacttcctctgccacaccaaatccagtagattctctgtgacaagtcccacagactaaggcaataacttcaaaagaaggaggtctcctggaaacggtgtggaactctcagccagagaaaaatattgggctgtgattctcctggaaatttctgcttattcttccatttctttttacacattaacgaaatgttcctaaaagcctatgctgacgttttcaaaaaaaaaatagataagaaaccatatcctaagatggggttgtaggggaaaatgtaagccatgtcttctagaagctggctacaggtgtccctgaccatgcccatcagggtatggtcaaggtaatgtcaggatgatgtgggatagggtttaaagggacagacaaggcacatgggccctctctctttggcctcccttgccttgctgcccctggcacactctgggttgcgtttggttggtgttaatctaataaaagatatctcaacctcacagattacgtatcttctgttaatatggggtcactagccatggcctcaactcaggaaaaaccagcccttttccaaatcattcacgtcattcacataagtacaaatactaaaaactttcccaacaataaaatttcatatggctgtacacctgtcattgaaagtgggtttaaatgtctggtaataaaaggttataataagacttaaaatagttcaatacttcaaaaactcacaagaattatgtaatgtatgttaaacaataactcatcataaaattatattaatttgatttaagaaatatgtggttagccttggatgatcctatgttaatcaaggatggtcctatgttttgattaatcaaggaaatttttgtgttttgattaaccctggatgagtctatgttttcatgtgactgtgtcaagtaacaataatatcatatgtttgggcttgcttaagaaaaacattccctgagaaaatatctctgtttaaaaccttatttgagaattgcaaaatacactcagattcaaactgcctctgtgtttgtttctgtttgtcataaccgaatccttacctacctattcattgaggactctcatcccagggactcccatattcagctggggtggtctgtggcattcctggaaggaagagtaagcaagaggaggaatttaagctcaaacgaagaaagcaaaaaaaaaagaaagaaaaagaaaagaaaagaaaagaaaagaaaagaaagaaagaaagaaagaaagaaagaaaaaataaaagaaatgcctgggagataccagaggccagccaggaagacatggaggaaacaagaaagtaggaaatacagacatatagaatgaaagaaaggcaaaaagtcccaagaaaaacatagatgaatagaaatgggttaaattaagttaaaagagctagtgagacaagcaaaagctaagaccaggcattcataatgcctttatttgggagttatttggcatcccaaagaaaatttcaactacaaatggcacccaacatgagacccaaattttcacataggacgtgaaaaagctgaagagagaaagaaagaaagaaagaaagaaagaaagaaagaaagaaagaaaggaaagaaaggacaaatgagataaagaaagatggaaggaaagagaaaaaggacatggatcctttaagaggtgctgctatgaagtggagcacttgagcacctagcatgcaatacctcccacagcttgggcaccaacttcctagagctattgcagttaaatgcagctgttggttaagcacagctcccagttaaatgcagctcttggccaggcctataggcttaaggctcacctgtaatggacccacggaggagacggagccatagctagagttgcaaggcagagggcctagctgcctcttagcagtttaaggtttgactcactaaaggtgcacagtaaaacaggcccaggctgagaaaaccttcaaacaggttgcagtgtgtgtaagtgcttaagaaagaaaggaaaatgggtatagacagtcatgagaaaagcaaatatttaaaaaaaaattaaacaaagaatacaataatataaaagagccacataaagataggaaatacacaggaagtctggatcctgtatagtgctttgtagactttgaattttcattgaatgctgattggtgaacaaaagctgttgacagtcttgagattgtaaaaggaattgctggaataaactagcctagatacttaaggagtgtcttgactttaaaatgtaattcagaaaatgaattgctttggtaaagaagttgtacttttgtttccacaggaagtaaaagactgtggatccttcaaaattaatagagaccagatttgcttggaagagacaccctgaaaatcttggatacagatataaataaataagcctagaaaaactgcaaggcatttgatgtataagctgacgccttgatatgggaacatctctgagactggatgagacatgataaataatttgaggtacagagtcatcatgatttattacatcctatcctttcatatgtcatgtaactgtagcatgacaaactacactacaaattaaacccaaacaaactcccagtacagaaaaggagatgtggaatcagagtcccatccctaatcatgaagctatttggtattaatacctgctaagaaatggaaaaaataggttttttttttctaacaaagtgtcactgtatttattatattaatgacactttggagtagaaaaatggcctgcagcagttagacaatacaaaatggtctccatagagaatatttgttgggtaggtgtgcactttatgttttgttttgtttggcatgtatttttgtattattctgttgatgttgttttaaacagtttgtgtctctttttcacttttacatatttttctttttaaatgtttctctttttgtgggagagaacaagaggttagatgaggaaggaagtagggaagatttgggaggaactatgggaggagaaaatatgaccatattattttgtataaaatatttttagattaaaaataaatcaattacataagagtactcttaataatacatccaattcaatggtcacaacaattgccctggttaaactaagtaagtcataaaacataaccaaaagtcaagactgtggaaaaggaagtgatgaggaaaggtaagcaggggtgggagagagataagacagactatagagtaacaaaatgtattatatacatgttcaaagttgtcaaataacaaaattaactaataaaaggactcactaagagataattaataaagactaagaacaacagtgatcatagtttggtgtcataaaatacttttgcactcatagtagtgtgaattcactaaaattcctccctatcatgtacattggaaattgtcatgtgttatttgagctccatggagagttggctctggatataggattgctccctccatacttcatttcagattcaagattgttgttctcaaaatatcttataaagccattggtctatattggccactgtgaagagaatggatcagaaatgtgaaacaactcatgtgtgaaagtttgtgcagttggtaacagttggaggatcaagtatttccaacgcgggttactattgtagacactatgatataaagtcaccagcagtagggaagatactagacatttaactatgggagcttcatgtgtggagtaaacacctaattaagaaccacaactgatggttgcaacttgaacagtagatttccattggattttttgtatatgatttgattaaactgtgtatcttttgctgcttcctcttagttgtgcagggtcttagcccaaccacaggaggctgacttgggtctgaggggcagcctcctaggatctcagagacaatcagatgcagcagggagtctagtcaagcaggaactcatttattgccccacagcaagcatctttaaaagcaaaaaaaaaaaaaaaaaaaaaaaaaaacacagaaaaacagccagctaatggttttaacggtcagcctatcatgagcctaggcgccttatgctttactagtgaacacgagccattcatgcagtgaccttatctggtttgatcttggcaaacagtcaccctttttttttttttttttttgtaaacatctcaggacttgccctcttgacttcccctcagtgtcggctttaactggctcatgtaaccttcaagttggatgtgtcaccagagacacaacttttctacacaggattccctctattggaactctagctggctgcctttactgggctcacttagccaatttccactggatattttgtatatatgtctgcctatctgttacttgcttttattctctgagttacttgatatttatatattgtttacttcgtctttctgaattaagtattccaaagcattgagtattcagcaattcacccattaaaagatgaaaacatggctgtcacaaattttctccagaccacaaaaagcaatcagactttatacgttctaagccaattagattattcaaaactgtaaagctgtttttattttccaaatattagaagagcaaagagaataatagtctaaaataatggtatggaaccttcattgatttccttttgagttttgttttagtctatttgttatttccagtcatttcttctgggcaagtcactattctttcaaaactttattttcttgctcatgcccattatattctttcacatatgtgatttaacctcccttcaaagtaaacatttagcagatcagaattttctgtacataacaaaaaaaaaccccaaaatctatttgcttttgttttaaattgtttttatcaataattcctttatatggatgctttttttgttttgttttgttttatttaatttttctctaagaacaagttgtgtgcatttccaagcaactgtttagggacaggttagatggactggccagttcttactggaaaagttctacaaatgaaaagaattgaaaaaaaatggcaaccttttcctttagcacggaaaggaacacaccaaatgacatctatttcaaaagaccatgaaaagtgatctcaacagactaatcagtgcctatacaaactctccaatctgcaacctaagagtttgtttgattgctgcctattttctttctcaaggttgctagcattactagggctatattttagagactggtggattaatcattaatttaatcattgactaccaaggaccacatttataaatattcttcaaatgacagtgtaagatctaaaagtcaacaagattattggaaataggaacaaataatccatatcctatcattttactagaaaattactactttgtcccatactgtttcccagcttgtgctccatttaaaatttttgtttcctctacttacagctacctaacaaaccttgctttcagctttatttttttccaacattttttacttgaattaggaacaggattgtttttcatgaaaatcccatttcccttctcccacctgtcctcccttacccgccccccaaaaaaccttatctgtcacctatcttctctgctccccttggatggtgaggccttccatagggtgtcatcagagtctttcgtttcctgtggggtagggcctaggcccacccccatgtgtcttggctcagggagtattcctctacatggactgggctcccaaagtccacaccttggttaaatactgggcttctacaggaggtcctgtagatttctgaggtttcctcacagaaacccatgttccttgggtctgcatcagtcccatgctggtattccagctatctgcatctgggttccagttcagatcggtgattagttatgggtgtctgcttctgcttccaccagatgctggatgagggcatataagtctgtcatcaatctcataatcaggggagggcatttgaggtagcctctcttccgttgctgagatagttagctggtgtcatctttgtagatatccagacatttccctagtgcctgatttctctgtaaaccaaaagtgtctccctctattatatctccattcttgttatcgtgtattcttccccgactcatattttctgctccctcatgtccttggcatccttcttccgctctccttctcattctcctagctccttccaccctcttcccatgctcccaatttgctcagcagatcttgagcctctccccttctccaggggaccatgtatgtctctcttagggacctccatgtttattagcttcattggcagtgtggattgtaagctggtaatcctaactctatgtctaaaatccgcatatgagtgagtacataccatatttgtctttttgcgattgggttacctcgctcagaatggtgtcttctagatccatccattttcctgcaaatttcaagattccattgtttttttcctctgagtagtactccattgtgtaaatgtaccacattttctctatccattcttccattgaagggcatctaggctgcttccaatttctggctaatacgaatagtgctgctatgaacattgttgaacatatgtccttgttgtatgaatgtgcttcttttgggtatatgcctaagggtggaattgctggatcttgtggtagactgattcccattttcttgaggagtcgccatactgatttccaaagtagctgtacaagttggcactcccaccagcagtggagtgttctcctttctccacatcctctccaacatgaactgtcattggtgttttagactttagccattctgacaggagtaagatagtatctcagagttgttttgattttcatttccctgatggctaaggattttgaacactttcttatgtgtctttcagccattttagattcctctattgagaattgtctatttagttctgtaccccattttttaattgtattgtttggtgttttggagactagcttcttgagttctttgtatattttggagatcagccctctgtcagatgtggggttggtgaatatcatttcccagtctgtggtctgccgttttgtcttgctgactgtgtcctttgacttacagaagctttcagctttttaaatttatctttccacttttttctttaggtgtttcaagacaggttttctcggtgtagctctggctgtcctgggacccattctgtaaaccaggaagtgtctcaaactcacagagatccaactgcctcagcctcctgagtgctgggattataggggtgtgccaccatcacccagctatttttccattttcttcacatttctctgagcctttcttgccttcaatattctcccctaatatttcaatttgaatttcctacaattaacgagttttgtttgcagaaagtctgtttatggaaagatcagctgaaacctcttaaaatgttttccaaagatgttctagttaagaaagagatagcatgtcaaaaaagtttatgtgctcagattccaacaggagacccagagaaatgtgtttctacttctgctgagtctcccatgtcacaaacttcatttttttcttccttttctacccagtgcatgctcacttcaatactctaagtatgtatcatgataaaacaggatgtttgttttttaacccctccccttctcaccttttcccttcttatcttttcccttcttcacataagtggaaaactatccacttctctaatcaatgaaaaaaaaaaatggaagaagatgcttggtgggggatacggggcagaaacattaataactcagagcaggacaggtgggaggaatggatagatgcagctcacatgaaaaggggtcaaaaggtccttgaaatcaggcagtgaaaggaaagtaatggacttctcagagagacaagggccttggagagtatgtcaggagaatcctgtgagtgatcttatgcaaacagaagaggccttggtactccccagaagcagatgagagaggagccaagtcattgagcactacatttctccttgaaacagtctcctgtggctcttaagaggtaactgagccctaaataaagaatatccttcacatcattcttagttctcatgttcagaactggacattactacctcacctttctggtggtaagaatttggcatgataaacggcttctttgcagccttcaccatgttagttcagaacaaaccagatgaagatctttggtgtaacagaaaagactactaaacaataatgcaaacaacaatggagaaaggaaacacattgcaaatgaaaaagctacagcattttatttcttgaaattatcaacggtgcatctgaactctctgcgaacagatacatccaatataagctcaggggtattaaacttcacctcaggattctttaataccttgattaatgtgaactcatgaaaacctcaatttttgtctgttgtaaagagttactattcatttttatgtgatatttatctttttatttttattcaatttagaataatcttgttttacatatcaatcccagttccctcttccttccgtcctgccatgaccctcaccaaccacccccatccactccccagggagggtgaggccttccatgggggatcatcaaagtctgtcacatcatttcagggagggcaaaggccctcctccctgcatctagactaagagaatatccctccatagggattctacagtcacacattctgaattctcaatttaaattaaaatatctgtggtctaccataaagacaattatctaaataaactagaaatattttcatatgcttatcttaacaaaatgtcacaataatcttggaaaataacaaaggtaaccttgttcattctagcaatggaaaaataagaccttcacaaaattatcttttgaaagatattcattatttctttctccctgtctcttttctctctctctgttccctctctctctctctgttccctctctctctctctctctctctctctctctctctctctctgtgtgtgtgtgtgtgtgtgtgtgtgtgtgtgtatgagacagaggatgggggagatgaaatcagatattggctaccaggagacagatagagatatgactgaacaaaatgatgttactaaaataaaaaccaataaaaatgaaaggtagtttaatgaatgtagttataatttcatattttcctactgctcggcaatggacattaagaatctccacttacaaaagcacagacagggaaccaaatacactgaaaaagttcctcatgctaacattttacaaaaccaaggaagaacaaggtttcattcagttgtttatccttcatttttctatcgcaaagcaattaatccctcactatttgattggcttcccttcaatgccacttttatccttttttttccttctgatgtccactagtttctagctgttcttcactactgtctgtggggactgagcccagtgtgcctaagtatgggagtgatcactgacaatatcataagtaacttgatggtcttgaagcaaaggaaaactaagcactgcattgttgtagtaattttacatctttgatgaatacaaaataagttagcaaaagcaagttccaactggagttgtgataagacaagtccattagcactccagtaaattcacatgagttctggaagggtcttagggatggaactaagccttctaattatctttagatggaatcatattagaaattgagctctattcccctctgtatccgactcggtgactgttagttacttgggaaggagtattaatcattcagggcctgcaatatcttttttcctgtggattggcattcagcagcaaaaatagcacatttcagatgaatacttctggggctctttctcatgcctccatttcacacatgactcttactcatgaaaaagaagttagatataaaatctctacatttttcccattaccacaagactgtctgcattcacaattcctatgcccagaaagcacagaaagatttaagatctatcttcaacatttgcctataatttttgaaatctctcataagcataaatatttcagttttaggttctaagtgcctaagattgcatttctacattgcatcacatgtagaaatcaatatattcttccaaggaatctctctatatatgttaaaatactatattttatcagaggctctatcaagatcttctctttgccttaaaaaaaaatccaaggtcatgttatgatttgtttgcttctctagtcaaataatcctttcccactgctgaattttattcttttattctttgaaatctttatagtatgctttcaaatgagaaaaaaatcaatattctcctgaacttaatgggtcatatcctatgagtgcaactggcacctatatttgcactgaggaatcagtttggctacagtgaaatagatgtgttaaccatgatactctgctatgtgctgactctaatgcctgttaccccattatctagcagatcaaaataatgattgcaattacagtagtacatctcatataggatttatttcaggtaataatattaggttattctgttaattatttagaagacatttttaatcagtgatattaaatagttgacatactgaaatattgtagatagaaaggtatgtaaaacattaagttgcatactgaatatcaagtaatcttttttaaggcacaatttaagcacagactcggttgtaagcaatcacttttcactagcactttcttaaaaatgagtaattattttatacagcaatgtaaatggctcaaaatttcaggagagggttctcagagattagttatctcaagaagcctttttgtttgcattgaatatacatattgaatatatattggatagcatagggtttgtgaatatctgacttgtttcaaagcgtcggatgaagatttgcacaccagcagcctaggctctttctgctactacaacttgctgtgcatgcctctgaaggcatgctcagtacagtaccaacccatagtcaatgctttcctgcatgggtgtgcagtctaacagttattcatatccaattttgcatttttttaaaattatggcacattaaataagagatttaccagagccattcacaaatatctttctaacatggtagtagactctacaaaaatcactggagttttgcctttctcccttgccctttgaaatgtagtttctgctattccatcaaatggaattatgggttttacaggacaatgccctctctgtgagaatttaacacagtagatatgaggatcctttccgcaggttttcaggattttaaagatttatttatttttatttttattttatgtgtatgggtgttttgcctgttttatgtgtatgcaccatgtccttgcattgcccgagaaggccagaaaagcaactcaaattcctctataactggagttacaaatgattgttacctgcaatgtgagttttggtagtcaaaactagccagtgctcttaactaaaccatccaggccccttactgatgcatttttaatatgaatactaataaggagaataataaattcctaacactcactatgtgtagataaaagaaattagaagtcactatactcacatctgttatcaaggcttctatcagctttgtaactcctctaagatgtaggctacatacaggtaaatatttatccaacttcagaggaggaaccactgtggggattagaactaggattttcagaaagtaagtggtaaagatgggaaatggtagaatatgtgtgagaagtaatattttattcatagataagtttgtgttcaacagaatagttcattttctgctttgaccagtaccaccattaaagaggaaggagaatgttatattcaatgatattccccatgtgtaattcgtatggaaccaaacattcattctggggaaaacattctaatttttctactaggagaaggtttgcattgatttctgtctgtgttttcttatacagttttattaaaaactgtcatcagatgaatcaattgcttcatatcactttagcaaactgtacaataatactgtataaaggtccacattatcatagtcacttcatctccccttgtttctacagattagctacaacaatggtaggatgaaaattggaaagtatgtataaaatacctttgtctggtggagctattgtctctaaagaattatttcttggaaatataattactgagtccatgagtttgtggacttttcagttaaagtttataaaggagttccacatagtgttacagcattttcctcttcaacaaatgatgtaatggaatagcaattatcaatgtcttttgtacaaaactgattggaggtctttatttaaatgttgtcttttaatgtgtgtttgatctaaaatcattattttttatggcactgctataattttcataaatacaaaattactttatattaatgaaattgtcattgattttgttcatattactaatatatttctgtttacctaataaaagcttgataacgtcatgattatttttaaaatttgtggttgacaataattaatcagacatacatattgcaaataaagtacaaaatatttataattaattttatgttttaatttttcccatagacactcattcacatgtaagcgtttgctgtgtaagagatctgttagatatttacaggcattcatgcacattaaatttattcatatatgttattcacatacattacatcaatttttgttatttattctttgtcattaccataataaatatttagagcttaatttttagcatacatttgtaacatgattctatttcatgtgtgatctttagttttgtacctagagatgacattttataaatcagtcttttccactttgtaatattttcatgaggcagttagtacttttgttccaattttattttgaagttttgtattcattatttgagtaatcttatcttgtattcctcagatttatcatacttcctatggaaaataaacatgttccaaagatggccatttttgtctcttctattttggtgctcacacagattacatacactacttcatttccatgactaattttcatagttccctcttttaaagtgctgactagcatgtgggtgagatagtcttctttcaggagagatgcctggattatcttttgaatggttactgttagtcctcccatcccggggttttgcattattacccaactctcattgtcttttggcattgtagtcctcagttttcagccattctgttcctcccttgtgagtgattgttgatgcccctccccctgctccattttcccttatttatcattcactgaatcacatagaagcagcttagtctaccaagtttctctagaatatgccctttgcaaactttctaagccatgggaacaaggcagattctgtatttgatactttgaatctctatttgcttcttacttttgttgaaaatgcattattattttcccactgactgcatattgttgttgctcaagaaagatttaaagatgttagtaaatggattcttattctcaataacatcactaaagcccttcagagaacattgtcacaaagattatcagagagtttgctgtgagaatatatcacctagtcatttactagtattgtaacacagtatggctgaatttataactgcaactatttcactctagttctgattgctttttcatccattaacagttattatgatgttgcatttattttattcaatttatttactgattgcattacactcaaattacatttagatatatttaattattcaatcttattactttcaattactctatagatttccacttatattgctttatgctatttttctggatgcatcaacattccttccattctttgcacatcctatgtcattgacagttgataagtatgtatttattttcatcttaaccctatgcaacaattttgtctcttcttcagcttttgcttagcatccatgaagaagtaactcatcatccccttcttcaagacagccaggaagaacttttaagcgtttctctagaatctcttaacagattttctgttgctttaaacagctaagactcttcggggaagagtgggcgcgtgcatggacacagaggctttttctcccagaccttaacatcttgctcattttagaaagaacaatttacaaagatagtttacactcatatgtttgttttgagtattttgaaaagcaaatgctctgaccaaatactaaatagcacagagagttcatttaaggatcaaaattttgtttatttagctcacggtatctattaaagttaaatcaggacagtgttgcatacagcatctaaaaagcaatatattttattctcaaggctgccaatatgtcttatcaggaaaagtgcttgccatgatgagaaccagagtttatatcactagaatccttttaacactcagacagacatggcaatcttcaataactgaacacccttggaggtaaaaacaaagtaccctagcaaggtggttagaaagatttacagaagtagtgtgctccaagttcagtgggagacagctttgtaacaaagaagatattagatgtttaccttggggcccctacaaacatgcaaacaagcatgtatttaactccacacatccagtcacacatgcaaacatgcatagagaaatagatgcacattttataaacaaacaaaaaaggaacaattaaaaataaataaatgaaaattcctttctcacttagaaaaacaattgagaataaatgaacaactaaattctattgtattagaaggcatagtctttcaaagatttatgtattttagaagatctaagaactaagaaattgtttcaaaaagattgtgcgtcaaaagaaaaaatggtatattaataaataaatggaagttagtttttgatgagattttaagatgaagcatctagaattcattaaaaaaaacagaatctaaaagaagactactacagtttataaaagcaagcaggagaaagggtatacagagtgaaaacttccctcaaagggtcttgagatcagtcaccagactgcccttgaattttaaagcatatggattctccctgaataagttctacttatattttaaaaatgttttggatgttgctttaacatatttgatccagttcgatattttatgttccttttctattattgaatatatttattcattttattttccattttgccctccattgcaaaattcttagtttaacaaatatatttattttaaccaacaatatagacaagctattagggttttcaagtcaagttcctatcttcatgcttataaacacggttcttaaattgagtcatgaaataaggtaaacctgaggcatgattgctgcttccttaccataaatatgaagataacatcaacacctgttagattaaataaataaaatcagtgaacgaatatgttttggaaactctgttttcttgatggaagtaatgtaaatgtttgttctttccttagcagccatagaagcagtacatttctcgatactcacaaatctttccagaagggcttctaacacaacctgcttgctcttcttacaaactgcttcttcaatggttctctcagctgttctcatgtaaaatgttaaggctgccaattttgtttgtcttctaataatcccacttcttattaattatatcaatgtgtcatcaatattttctaactttcacacagtattgtaagatgggttatttttttctacccatttctgtacattgccaacatcttgtctgtctgagtccaaaagatcacacctgtgcaaattggaaagcatccaatgccttctgcagtgttgaattatgttatccattaggtagcacctttggtacagtatcagtggagtcaagtgttctgttctattggtttctgcctcactttgcacattttgtcatccatggtacttttctttctgtcttaattatttttttaatttatttattagttctagttagggaacaagcttgtttcacatgtatgtcttaattatttttatatatattcattccattaaaatgatgccaattttgaatttaatattttccttctatgtccacatttttacaatataaaatagcagtttgcacagtgtaccaaattttaataagtttggtctaactttgtagttaattacaacatatacatataatgcgtatattataaaacatttagtagttgttttcaaataagatgaagtgagagtttaatgtatgagaaattgatagatgattaaggaaaatatattaacattgatagatgttataaactgttttgcctttcctgaattaaagaacgtatttggccaggtattggtggtgcacgcctttaaccccaacactcggtaggcattggggcagatctctgtgacttccaggccagcctggtttccagagcgagtgcccggataggctccaaagctacacagagaaaccctgtctcgaaaaaaaaaataaaagaatgtatttggattaattatagatataccttaagcatagtgaaaatgtcttattacctcagtttattgaaacattggtgcagcgtatttcccaaaactacttaatccttcccagaattattatactacaacatctgacatgataggacaacacaaattatgaacttacacactaaaatgttacagagagaaaaaaatccaaacgataatgtctttcaaagttgctatcatatcaatgtggggttggtccataaattggtgagtttttcaatatcgcagtgtcatcatattcttcagtctcccaatttctctggccacatgatttagaatgcatatttcttcatctttctccctgtagttatctcattaatatatcttatagttttgataaccttgcatgtaattctcttctcaatggtagtattggataaacagacactggtcatcatcttttcaggtcagtttgcctaattatatacttggcattgagtagtttttcctttaagcatactccaaatattgtataaaactggacttctcatggaaaacagaacaactttattttaagaatcccactctctactattatataaataaaatagcaaacacaaggaactgagattttgatattattacctagttttgattcaaatatatcagtctaaacagacaacgaaaaaacttctgttttattatgttaactcaatgtttataataaactaggaactcgcttttagtagcttttttcaaaatatgaatcaattccatgcaatattctcagagacatttctcttctctcatttaatccactcttctggagtatcctagctgtattgtacacctggggcccttacatactcacagttaagaggtgttttctattgttactgacctttaaaattgagtgtgtcctgtgttggggataaaaaaaagagcatattaatcaaagagggagtatgactgtgtggatggtacttgatggtttcatgataaaaaagaaaatgtgcaaagacaacttcatttgcaagggacaagtgatgtggataatgtttgtgtaaaactctgtttctttttttatgctgtatgtatcttttatgctttgggacacttttcttagacttccctaagactaggcatatttacctattatatattttgtcaatttacagtgatgtaaagaaggaagaaaaagaataaactattgtgtattttagtaataaaatgcatttaatttaaaagaatcacttttctagtaaattattccttacattgaattataacatttgttttcaaatagcttatacattattgcttactgtaaattcctagagttttgaattttatagccagctgataattaaaagtaagtgtattattatttacattaaaattttaaattacttttttacatacagtatattttaatcataacaaccccctcctggaacagggacattgtccctgtacaacttcttgttctttcttatgctccccctttcacaaataaataaataatacaaaacaaagaaaacaggacaacacaatggaactaattaactaaaaacaagtaagacaaaaaaggcccagataatataaaacagaaagcatatacatagaaaaacaaaaacagaaacaaacaaacaaaaaaaaaaacatgagaatctgttctgtgttggcctgctattcctgtgtgtggaaccaggccccaattaggttgatacattgtcagttcattggagaaaattgattctcctttccctttaggcatcagttgaaaatagcttcttggttagaagtgggactctgtgttcacttccctttctccacactgggattttatctgggatggatgtttactgctcttgtgtatgctgtcacagtcttccggagttcatacatgtatcagtccacataaaactcttttcttggagtcatccatcatttctgtctcttataatctttctgcctcctcttctgcaaatattccttagtcttgagagaaagggcatgataaagaactctcatttagaactaagtgctgcaaagtctctcactcattgtacattgcccagttgtggttctctacattacttataatctaatgaaagtaaaagattctttaatgggagttgaatggtgctctactctatggtagtaaaaatatgccatcagaaatatttttattgccatgtttctttagcagaataatatttgtagcttttcccctaggacccatgacctatctagtctgaggttcttttccactttatcagtatcaagtacagttccatcacctgaagtgagcattatccaatcaagaactatgtaatatgactgaatggagcaagaaacaaaaacccacttgtctatagtacacacgaaactcagctttaaagataactgctacaagtactaagtcaaagaagaccaggaatcaagaaggtatcactatactaatatctgacaaaacagacttcaaactaaaactaatccatgtggttaaagagagacacttccttctaatcaaggaaatagctaatcaagaagataccgctatatgctatatatatatatatatatatatatatatatatatatatatatgcaccagtgcacccaaatccattaaaaggtactaatgtatttaaagatcaaaataagcatcaacccattagcagcaggttatttcaataccccaaattcttcaatagacaggtaatctagactaaaaaataagcaaagaaatatcagaattaactgacatcatacatcaaaaggactcagtagatatttacagaatattctatccaaacaccaaaagcaacacaaggatgcttttctaaaatagaatacatcctgtgacttgaaacaaattcttaaaactctaaaagattaaaagtaactccatgtatcctatttggtcacaaagtaataaaacttaaaactgataacaaacatatctctagtaaatacaccaatttatgggtattaaacaagtcattattaaatgaatgatctaaagaatacatcaagaaaaaatgagggggctagagacatggctcagcagttaagagcactgactgttctttcagaggtcctgagttcaatttccagtcaccacatggtatgagatctggtgccctgtgctggcagaagactgtatagactgtatacgtaataaataaatacaatcttaaaaaaatgaaaaatatcctgggactaaatgaaatgtaaaagcaatacaacaaaacccgtttaaaaaaaaagccaaaaacattgaaatcagttctcaaagagaacttcaagctttaggtgaatcattaaaaaatctgaaggaatacaaataaatgatataataatgcaactcaaaagtttggaaaagaaatagcaaaccaaatccagctgatggttagaaataataaaaaatcagagcaggaatttatgacacagaaacaaagaaaatattacaaacaatcaatatatctaagagctggtttgtgaggagataaaaaattacaaacattttgctccaagtaaccaaagaaagaaagagagtacccaaactaacaaaatcaaaatgttttaaggtaataatttgaaagcctgtactgaattaaataggaaagccaaaaagaaatggatgaatttcttgattcactcaaacataaaaaaaaaaaaaaaaaaaaaatcatgggactggagagatggttcagaggataagagcactgactgttcttccagaggtcctgagttcaattcccagcaaccacgtggtggagcataaccatctgtaatgagatctggtgccctctttaggcctgcagggattcatgcagactgaacactatgcataataaataaatgtctttaaaaaatcaaactagctgggcggtggtggcacatgcctttaatcccagcactcaggaggcagaggcaggtggagttcaagaccagcctggtctaaagagctagttccaggacaggctccaaagcctgtttcgaaaaaccaaaaaaaaaaaaaaaaaaaaaaaaaaaaaaaaaaaaaaaaaaaaaaccgaaacagccccatgacaagtgaaaagattgaaatggtaataaaaagttttaagctaaaaagaattccagggcaatatggattcacactagaattctactagactttcaaagaataactatatcaaatccttctcaagttaataaaaataaatggaaaaaaaaacagaaggcacaatcctaaacttctgtgaagccattatcactctaatacaaatataagaaaagacacatacaaaataaaactataggccaatatacctgatgaatacagacttaaaactgctcaacaaaatacttgcaaagaataaagaggtacataagaaagatttcccaccatgaccaggtttccctgtccaagaaattggagggaagtttcaaaatatatgtcagtaaatgtagtaataagccatataaatgaacttaaagaaaggatagtatgatttttctcaataaatacaggaaaaaaaaaacattctaagttgaggtgacctgaaagcctcctccctgagaactacctttcatggtaccagaatcttccatgcagcttccaaaggaaggaagcaagtagtactaaccaaatatgacacctatgacatgtaacaatgaccaacattgcacaataaccctgacattgcagtgttatggcatatgaatactggtggtaaccaatagctctctagttggactggtctcatgggcaggagtagttaaccaaaaaacaattgaccatctagttttcttgagtgcttttattggcttaagtcttggcattttattttgttgttgttgtttgtattgtttatttctttgggggtattttatttttttcatctaggtttgtgaatttgttgttgtattgggttttttgtttttagaaagaacttaaattggggtaggaagggggagggcactggatggacttggggaaagggaaaatacataattaagttcatttaaaattaaaagtaattttaaataataaaatataatgaaaaacatgtccaaattatggttgaaatcatgcttccttggaattaatttcagtgagatactttcataagtttctgtgcatatgattgtagtatggcttctgagaagtagaagtatgacaaatgtttgacagaagttatactttaaaggatttcatcctcacagaatttattaaaaacttaatttgcatgtgattaatcttttgaataaaaatagtttaagaaatattcactattgtgaattacatgtatttcattcatcatatggtgggatttatatgctaagaagtgagacatattaattttaaatatcatattttttgaaaaattattgaaatatttatataaaatcttttccaagataacacagcaaagagttttgtttgacaattttctttatttttctggtaattttcacccaatttatcttctctcaaatcacacctttactttcttctttgtaagaagtcatcctcctattttcatatggttttattatttatttatttatttatgttttctgtgaccaattttttttagtatgatttattcattggggcatggacaacatgtcactagatacaccactgaagaaatgccatttgtctttcaagcagggctggggcctgaaattaggtccttttgattatacagcatagatcaacctactaagccattccatagcccaaaacagacttttagatgttaagaagcatctcctgcaatgaactcgtttcttcattctattatgtttttaataatggatatatcagtgaccaccaatactctcatattcatagtatgtgttctgcctcaaatactatgagcaaataccacatgtgtaataacaatactatgctggtagcttcttagatgttaaattctctcaatgcagttctgcttttcagaccttaaacttacactgtgagaataccatgttcatcacagcatttgacaatttgaaatctttcattgaaactctgttttctataaaataaaacatagtatttctacccagataataccaatttgtaggtttagctacagtttttttttttttttttttttgtttttcgagacagggtttctctgtatctttggaggctgtcctggaacaagctcttgtagacaagctggtctcaaactcacagagatccgcctgcctctgcctcccgagtactgggattaaaggcatgtgccatcaccaccaccagtctagctgcagttctgtacacaatgtaaacacaggcacattgatcttcagtgtctcatggcattacttgttatttttaaatctatgatgatgtatagttactgaatcttgcagaccaaaaaacaagagtcattgtttgaatccaagttccacttttattttgtaaaagacaattgcctcaagggcattaagcacaattttataactttagaaatattttcctgaataatttcaattaattcatttagtttaaataaataagcaacttttagatattgagtcttgcataagcatcatctatgtatttgtactcatactggcattgcctctctctctaatatatattgcaaaatatgtgtattgtttattgaaataaccattaggtaatgatttatttatccaagttgatttcttaaattcattcatttacagtcaattattgagatatgacaatacactaagcatgtttctgagcaagtttctataacaagaagtatattgataaaattttcaagaagagaagaaatctttcacatctttctccataataatcattagcacagctgttatgccatttaaatgaaagataaagcaaaaaagaatcattgttttctgataattattatttttatagtaagtatacatatactgaatttatgaggttttcccttacctatgtatgtttcatggaatttttttaactctagattgtgaagtgtacagtaaatgaaaaaaaaataacaaaaccaaaaaacaaaacaacagcaataaagacttgtaaggctatcactgtaactgattagctccataatgccattactattagaactgaaaacctttttctaccctaaataattgggttgaatattttgtgttatttggtaaggcaaattaagagaactaaaatcttatgtgtttatgttgtacaactgcagccattaagatgagaaattgttgtcattagagcatcagtagaagggataatgacataagcatgtttgtattattcaaacaccctggttccagacacaaagttagttcacggttagctttggggtacacttttatctttagaatactttatgctctgaggtagtggtgtgttgttcctattatagaacaaacagaggtctctaactgtgctatgcataagagatcaacaactgatgaccagagtaatatatacctttgttatctgtccaggtgtgaggagcaggacctttgctgtacatgacttcaaccctgcatttgaagataaagtgtggggccatgctttttccttgatgtaaaaggatgtaaaaagagtgaacacatgacctcagacccctccatagagttcacaggggcttgttctttggttagtgcttggggccactacttacttgcaaggcctttgtggctttcaactttatctgcttgcaacagtaaaagtttgaccctttcctacagtgagttaactcctctttgagcaaagcacttaggactagagatatccctgtacttcttgtccaaagctctggctaggaaactttgaattctaccatcatttcttctctgtgattttcttcaatatccagtgctagaggttttcagaaatcctcttacacaaataacataatttgctctgctaaacatttggttcattttgagagagttccttggaggcaaatcagaaaagtaaatcgtattcaaaaggtttggttgttaaaagtgtaaaatagggggctgtgtcaatttagatttgaatggacctcaggcacaaatcagaggtccctcttggtataaaagactgtaaaatttgtgttctacttttaagatctcctgctgcataagggacttccattccaagtgccctagggtgatctagttaagtctgggaagcctcagactcaaaagtgtcttcgattattatgtaaaggaaggcgtgtcacttcaggactctgcttagctcagagcacacttgtgttcaaagaacgctgtgcattctctgcccagtggaaaagaacagaagcagccttacaaatacctgcatttcagcttctttcatgaaaagctgtttgacattgctctgcatagcaagtgacataaatctgaccagtccctatgtaacaggacttaccagggatgggcatagggagaaagtaggtttgtaaatgcaattcagcagtatcacaaccgccttggctgagtgagtccctcagtcccatctcaaacctggaattaatagtgaatatatacatatacatacatatatattcttttcttcaatttctgcttttcctaatgtcaatggatacttagcctctattcacattagcaatctgattagaattgaaaatttgactctgcctgcttttgctaatgaaaattttagtttttcgcgtctgattagagaatgatttccaaaattgaggataaccatactttaaatgaaaactatctaatgggctaattttgttccatagccttgaaaatgaaaggtgcatctcaatgcccccccaccccaacctacccccacacaccggcattcagaatgtgcaatatgtggaaatttggaaattctgtaaatcctggatttgccaaataatgaacttataaaaatcttctcaatttctgatccttgagacatggaagtcataaagaccagctgtgtgacagagacataaattgctgttcctgaaatatacagacaccaacatgcagatttctctgagactcagttaattcattggagtgactctgtctcactttacaaaatacagaattgtaaaacaagacaaggatttctatcagccatagaagaaaaggagtggcaatgccacaggaaagcagggcaaggaagagagcaataagcaaagtgaacagaatgactaaactcactaaatagggaacccagaggagtggatgggaaagggcacatagctgtgtctcatgtagacacatcagtgttcatggcccattccttttgcatgcttacaagctgagatttctgctaaactgctctaacaagcatatgggaaaatgtgacccaagacattggtagcatcagcagagaacttgaataaaatgctagatttgtattgtcagcctagagccacagactcacaatctttgagtatgggcccaagcattctgtaatttaataaacattccatttggctctgattcagcctcaagttaagaactactcttacaatatccaaatagattgctcaatccataaactactaacagaagtacatttcttagtatagttttagttaatagagagaatgcacgtgtagcctggttatgtaaaacactcagccatgggaatggcataattagccttccagatttatcttgaatgctacccaattctttgtgtagtttttattctccatacagatatcatctgtacttattttgaaaactagatagccttggattccaattcagattttactacattactaatcctctatctttactgtattttgattaattcttctggacagaagacagacagttcgttttgagtctcttagtatacttgacacattagtacaagctttgccttcctggccaataacacgcatctatcccacaagattactgtgagctttcaaataaaaatctattaacaaaatacctagtcctcaaaaccaggcaattatttttataatactgaagttttgaaagtagtttaatactgggtattcaataagtctatgttgaatttctttgtacataagaagaaaaaaagatatctatttttctgatagaatgtttctgttgccaattttatgcatgtttataatatattctatctactattgcttccctactttctctggtctccctttcacccatatcctgttctccacaagtctacttcccaaattcatacctctttggttttttttttttttattgtgatcctttgagatttagcaagaccttctgtgaccacaggcttagaattttatacaatggaaaccaatgagctcacttatgggtatacaactgaaggaaatgccccagaatcaatcagtagtcatctattcaaaatgtatgggtagatccacataagtctctccctaatctatgatcagttgttgacagctccagtcttttacaggcccaagtaagctgctgctatgaggtcaggtttacaaaggccatgttatagcctaacaattaagttttaaatacattccacctgtcaccccaattttacattatttcatgatgttctctgaatcctagagggggatgtatcaatgtcctgatgggagttgtgtattcaatggtctcatccttatacctttaatagctgaaaatttgcatttatgcccaaatgaagcttctctaattaagaattcaagtagcatttatctattttattttagccattctgacaggtataagatggtatctcagagttgttttgatttgcatttacctggatggctatggatgttgagcaattttaagtgccttttggccatttgagattcacctattgagaattctttatttagaactctatcccatttttaatagttatttaaattagaaacaagattcttttacattttttaattgggttatttggtgttttggtgactagcttcttgaggtctttgtatattttggagatcagccctctgtcatattggggttggagaaaaacttttcctattatgtaggctgccattttgtcttgttgaatgtgtcatttgctttatattagcttctcagtttcaggaggcccattcattaattgttcacctcagtgtttgtgttaatcatgttgtgttcaggaagtggtctcctgtgccaattcattaaagggtacttcccactttctcttctaagaggttcagtgtggctggatttatgctgaggtctttgaaccatttggacttaagttattatctatctgtaatcttctacatgccagcactgtttgataaagatgatgtcttttttccattgtataattttatcctctttgtcaaaaatcaggtgttcatatgtgtgtggattaatatcagggtctttagtttgatttcattggtctacctgtctgtttttgtgtcaatacaaagctgttttcattactatatctctattgtagcgcttgaagtcagggatggtgatgcctctgcaagttcctttattgtacaggattgttttggatatcctgggttttttatattttgcatataaagttgagtattgttctttcaaggtctgtgaagaattgtgctgggattttgatggagattacactgaatctgtacaatgcttttgacaagattgccattttaataggttaatcctacctgtccaagaacataggagatctttccatttttttatatcttatttaatttctttctttaagtacttaaagttcttgtcatacagatctttcacttgtttggttagagttactccaagatattttatgttgcttatggctattgtaatgggtggtgtttctctgatttctttctcagcctaatatcttcttatacagtagggctagtgacttttttaaagttaattttgtattatggcactttactaaaggtgtttaacagctgtaggagttccctggtagaattttttgggtcacttatgaaaactatcatatcatctacagatagtgaaagtttgacttcttcctttccaatttgtatccccttgatgtccttacgttgtcttattgctctaattagaacttcaaagataatattgaagaagtatggaaacagtggacagccttgtcatgttccttatttcagaggaattacattgagtttctctccatttagcttgatgtaggatgttggattactgtatattgcatttattatattttggtattcacctgtgatctctgatctcttcaagacctttatcatgaaggggtgttggttttgttaaaggccattttagcatctagtgatatgataatgtggttctcttttgttcagtttatttatatggtagattacattgatagatttttgtatgctgacccatctctgcatctctgggataaaaactacttgatcatggtggatgatttttctgatgtgttcttggattcaatttgccagtatttattgagtatttttgcatcaatgttcatgaaggatactggtctgtagttctcttttttagctgcttctatttcataagggttatagatctatttaaattgcttatcagttcttgatttaattttggtaagtgatacctatccagaaaattttccattgtttcttaggtcaatttgattggaaatcatttctcaacattttactctgaggcaatgtctgtctttaaagttgaggtgtgcttcttgtatgcaagttaaggatggattctgtttttccatgcattctgttagcctgtgtctttttataggcctattaagaccactgatattaagggatgttactgaccatttattgttgattcctgttatttttggatttgttggtggtggtagtattgtgggtatgtttcccttgttttggcttttggtaatatgggattatctattgcctctgcttttgtcagtttagctaacttccttgggttgcagttttgtttctagtactttctgtagggtttgattcgcagatacttattgtttaaatctggttttgtcttggaatatcttgttttctccatcaatagtaattgaaaactttgctggatacaaagtctggactggcatccatggtctcttagtgtttgtagaacatctatccaggaccttttgtctttcagacttttagttgagatgtcaggtgtaattttgataggtctgcctttatatgttacttggcatttttcttttgcggtttttaatgttctttctttttttcttttttttttaaatttgaattagaaacaagattttttcacatatcaatcccagttcccactcccccgtactcccctactactccctgcaactaatatcctacctatcacatatcctttctgctccccaggggagggtgaggccttccatagggggtcatcgagtcaatcatttcctttgggatagggcgtaggcccacccctcaccccccactcccccaccccccacccccgtgtgtcttggcttagggagtatccctatatgtggattaggctcccaaagtccacagctatactagggataagtgtaagaacaatacacctggatgaccctgcccctaacaacagggcacgcacccgccatgcattgcaacctgtgaggactcttgcacaggtgcgaaaccccagtgctcataccaacctcctctttaaaaggtcctgcctcccttctctccccccttcttttttggctcctcttgggttggctgactacccatccctctctacccccctttctggtaaataaactccacatgggttgttcatccattgttcctttctttatatcagcagctgcagcttaaacaaaagaataacaataagtactgaacttctacagggggtcctgtagatttccgtggtttcctcacagaaacctatgttcctggagtctagatcagtcccatgctggtattccagctatcagtctggggaccaagagctccccattgttcaggtcagctgtttctgtgggtttcaccagcctggtctggacccctttgcccatcactcattcttctctgcaacaggattccagttcagttcagtgattcattgtgggtgtctgcttctacttccaccagatgctggatgaaggatataggatggcatataagacagtcatcaatctcattatcaggggagggcatttaaggtagcctctcctctgttgcttagattgttagttggtgtcatctttgtagatctccagacttttccctagtgcctgatttctctttaaacctataatgtctccatctattatggcatctccttttttgttttcttctattcttccccgacttccctgaactttctgctaccttatgtcatcctcaccctcctcttctcctcttctcattctcctaactccctcttccctccccccatgctcccaattttctcaggagatcttgtccctttccccttctccaggggaccatgtatgtctctcttagggtcctccttgcttactagatactctggcagtatggattgtaggctggcaatcctttactctattctaaaatccacaaatgagtgtgtacataccatgtttgtctttttgtgattgggttaccttgctcagaatggtttcttctagttacatccattttcctgcaaatttcaagattccatttttttttttttctgctgagtagtactacgttgtgtgtaaatgtaccacattttctctatccattcttcagttgagtgccatctaggttgcttccaggttctggctattacaaatagtgctgccttgaacatggttgaacagatgtccttgtatgcatgtgcatcttttgggtatatgcctaagagtggaattgctggatcttgtggtagattgattcccattttcctgaggagtcgccatactgatttccaaagtggctatacaagttggtactcccaccagaagtagaggattgttcccctgtaggggaccaaaatagttccattatgtcttaaggtccagcctctggtttcactaaacaggagcacctgaaatttccgggccactattgtattgctaattcgagcaagtctgctattgtttagcatagcctcagtgggaaaagtcttctagtttgcttctctacagaactaagcattttgaataggcctgcaccagggtggatgtgcaaggtgcataagtaacaaggaggatagagaattaggagccatggagcagggaggggtcaaaaagagagaaatgacctcgtagcaatggaagcatggttaagaaacagccaagaagatgctaaataaacaagagactctagttttacaacatggaactgagagctctctaaagatgacaagatgcctgtgtttgatctttgttgcttttgggttgctaggagctttcaagtccacgttcccccactctggccaaacctcatgactgcagtggcttagggctgagacatgccggatcatgacattcccctttctccatatcctctccagcatagactatcattgatgttttttattttagtcattctaacagtttgttgttttgttttgattgttgttgtttctaagagttgttttgatttgcatttcctttatggctaaggatgttgaacactttcttatgtgcctttcagccattttagattcctctattgagaattgtctatttagttctgctcaccactttttaattggattgtttcatgttttggagacttgtaggggaacctgtagccagcccctaagaaggcgtggctagtaggaaattaccaatacggagtcaggtagaaatataagggtatttaatagggaaaagccttacttacagagcgaaccagccagccggtggtagtctgtacagcaagaagcaaagagaaaccgaaaccgaaaacgcagtccccctactcactctgaccatgccctcacaagccctcaggtacacctgtagccagctcctaagaaggcgtggctacagcttcccctacagagactcgtttcttgagttctttgtatactgtggagatcagccctctgtcagatgtggagttgttgaatatctttccccagtctgtgggctgctgttttgtcctactgaccgtgaacttagccttacagaagcttctgagtttcaggaggtcccaattatcaatttttgatctcactgtctgtgctactggtgtaatgttcaggaagcagtctcctataccaattaattcaagagaatttcccactttgtcttctaattggttcagtgtggctggatttatgttgaagtctttgatccaattgaacttatgttttgtgcatggtgatagacatggatctatctgcagttttctacattccagcatccagttatgccagcatcatttgttgaagatgttttgtttattccatcctataaatttagcttctttgccaaaaatcaagtgttcgtaggtgtgtgggctaatatcagggtcttcagttctattccaatggtctactgtatatttttgtgccaatatcaacctgttttcaggacaatagctctgtaatagagcttgaagtcagggatggtgatgcatccagaagtgcctttaatgtactgggttgttttggctatcctgggtcttttgtttttccatataaacttgagaattgttctttcaaggtgggtgaagaatcacgttgggattttgatggggattgcgttgaatctgtagattgcttttggcaagattgccatttatactatgttgatcctacctatccaagagcatgggagatctttccattttctggtatctttaatttctttctttaaacactcaaagttcttactgtacagctctttcactctttttttggttagtgttaccccaaggtattttatgttgtttgtggaaattgtaaaggatgatgtttctctgatttgttgctccaccaatgtgtcatcagtatatagtagggctacacatttttttagttaatcttgtatcctgccactttgctaaaggtgtttatcagctgtaggagctccctggtagagtttttcgggtcacttatgtcgattatcatatcatcaaaaatagtgaaagtttgacttcttcttttccaatttgtatccccttgatcttctttagctgtcttattgctctagctagaattcaaggacaatattgaagaggtccagagggagtggatagccttgtgctgtcccctattttagaggaattgcattgagtttccctccatttaacttgatgttggctgtcggcttgctgtgtattgcttttattatgttaaggtatgttcctgttatccctgatgtctctaagacctttatcatgaaggggtgttagattttgtcaaaggctttttcagcatctagtaagatgatcatgtgggtttttttttctcagtctgtttatatggtggattacattaatggattttcttatgttgaaccatccctgcatccctgggatgaagcctacttgatcatggtggatgatttctctgataagttcttggatttgatttgccagtattttattgagtagttttgcatcaatgttcatgagggatattggtctgtagttcactttcttagttgtgtctttgtgtggcttgggtatcaaggttattgaagccatgtaaaaagagtttggcaatggcccttctgcttttattatgtggaatactttgacgagaattggtattagctgttccttgaatttctggtagaattctacactgaagccatctggtcctgggctttttttagtggggagacttttgatgactgcttttatttcattaggggttacaggtctatttaagttgcttatctgttcttgatttaattttgttaagcaaaatctgtccagaaaattgtccatttcctttagattttttaactttgaggaatacaggttttcgaagtatgacctgatgattctctggatttcctctgtgtctgttgttatgtccccctcttcattcctgattttattaattttcatgttcagtctctgccgtttggtaagtttggatacaggtttgtctatcctgttgatgttctcaaagaaccaactctttgtttcattgattctttgtattgttctcctagtttccactttattgatttcagccctcaatttgattatttgcaggcatctacacctccagggtatattggcttctttgtgttctagagctttcaattgtgctgttaattctctagtgtgaatattctcctgtttgttcatgtgggcaattagtgctatgaactttcctcttaacactgctttcaaagtgtcccataagtttgggtatgttgtgtccacattctcattgaattctaggaaatatttaatttctttttttaatttcttctccaacccaggaattatgcaattcggtgttacttaatttctatgagtttgcaggttttgtgcaatttgtgttgttgttgaattttaactttaatgcatggtggtctgacaagatacaggcagttattttaatttttttgtacctgttgagttttgctatgttgccaagaatgtggtcgattttagagaaggttccatgtggtgctgagaagaaggtaaattgttttgtatttgggtggaatattctatagatgtgtgttaagcccaattgggccataacttctattagttcctttgtttctttgttaagtttctgtctggtgttcctgtccagtggtgagagtggggtgttgaagtgtcccactataagtgtgtgcggttttaggtgtgatttgagttttagtaatatttgttttatgaacgtagatgcttttgtattttaggcatagatgttcagaagtgagacttcatcttgatggatttcttctgtgatgagtaggatgagaccaccttcatctcttttgattgattttaatttaaaatccaatttgttggatattaggattgctacccccacttgtttcttgggtccgtttgattggtaaatcttttcccaactttaattcttaggaactgtctgtctttgaagtttaggggtgttgtatgcagcagaaggatggattctgtcttcttatccattatgctaacctgtgtctttttatgggatatttaagaccataaatatgacggatattaatgaccatttattgttcattcttgtttgttttggatgtggtggtggtggtgacattatgtgtggatttccatcccttttttcttttggctgttggtaaagtgggattatctattgcctatatttttctggttgtgggtaacttccttgagttgcacttttccttccagaactttctgtagggctgggttggtggatatgtattgtttgaatctggttttgtcatggagaatcttgctttctccatctatattgattgaaagctttgctgggtatagtagtctgggctggcatccatggtctcttagtgtaggtagaatatctatccaggaccttctggctttcagattttccatggaaaagtcaggtgtaattgtgataggtttgcttttataggttacttgacttttttcctttgctgctcttaatattttctcttttttctgtatgattcagatttgattattatgtggcaaagagccctttttttggttcagtctatttggtgttcggtaggcttcttgtattttcattggcatgtctttctttaggttgtgaaagttttcttctatgattctgttgaatatgttttctcagcctttgagttggatttcttcaccttcttctatacctattattcctaggtttggtcttttcacagtattccatatttcctggatattttgtgttagggatttgttggacttaagatattctttggttgttaagactatttctcctagtgtatcttcaactcctgagattctctcttccttctcttgtattctgttggttatgcttgcatctgtagttcctgattgtttacccagcttttctatttccagcattccttcagattctgttttctttattgtctctatttcagtttttaggtcttgaagtattttcttgaaagatttgttgatatcttgtattttttggtttgttttttcttccatttctttttttttgtcatttttctcttgtgataaaatttcccttttttccaacttttttatttgaattagaaacaggattgttttacatgacaatcccagttcccttctcccacccatcctcccctacccccctcaactaaaaacttatctgtcacatatcttttctgcttcccctggatggtgaggccttccatagggtgttatcagtgtctattgtatcctttgggatatcgcctaggcccacgcccatgtgtcttggctccgggcatattcctctatatggaatggactcccaaagtccacacctatgctagggacaaatatggagcttctacaggaggtcccatagatttctgaggtttcctcacagaaacccatgttcctggggtctggatcagtctcatgctggtattccagctatcagactggggagcaagatttccggatgttcaagtcagctgtttctgtgggtttcaccagcctggtctggacctctgtgctcttcactggtccttctccgaatctgggttccagttcagttaggtgattagttatgggtgtcggcttcttccaccagctgctggatgagggcatataagtctgtcatcaatctcataatcaggggagggcatttgaggtagcctctcttccgttgctgagatagttagctggtgtcatctttgtagatatccagacatttccctagtgcctgatttctctgtaaaccaaaagtgtctccctctattatgacatctccattcttgctttcatgtattcttcccctgactcaaactttttgctccctcatgtcctcagcatccctcttcttctctccttctcatactcctagcttcctcccccctctttccatgctcccaatttgctcagcagatcttgaacgtctacccttctccaggggaccatgtatgtctctcttagggacctccatgtttattagcttctttggcagtgtggattgtaggctggtaatccttactctatgtctaaaatctgcatatgagtgagtacataccatgtttgtctttttgagattaggttacctcgctcagaatggtttcttctagatccatctattttcctgcaaatttcaagattccattgtttgtttccactgagtaggactccattgtgcaaatgtaacacattttctctatccattctttggttgaggagtatctaggctgcttccagtttctggctattacaaatagtgctgctatgaacatcgttgaacatatgtccttgttgtatgaatgtgcttcttttctctgtggctttggaggccgtcctgaaactagctcttgtagaccaggctggtctcgaatttcttccatttctttaagggattttctcatatcctctttgaggccctctatcattttcatgaagatgtttttaaggtcattctcttctgcttcatctgcatattagtttttctgttgttgaatgtgcttttatattttcttcttcccatcctttcttctggtgggtatagcaggagtctcttcctctcctggtgggtattggactaaggttcccttctggtagatgcaaacagttccaatactctgatgtctgtcctcttctcctggatggaagcaggactgttactggggccttggcagtctctgggtttgctagagactgccggctgagttcggatccagtgagcagaccttaatattctttctttattctgtattttggtgtattgattattgtgtagtgaagggactcctattttggtccagtctatttggtgttctgtaagcttcttgtactttcataggtatatcctttaagttgtgaacgttttcttctgtaattttgttgaatatgttttctgtgcctttgagctggaattctttgctttcttctatacctattgttctcaggtttggtctttcatggtgtcctatatttcctgtatattttgtgtttaggatttgttggacttaacatttccttttttcaatgaatctatttcctctagtgtattgtcatcacctgagattctctctttcatcccttgaattctgttggttatgtttgcatctctagttcccaatcatttacccagattttctatttacagtattccctcaatttgtattttctttattgtctctatttcagttttcaagtcttgaactgttttgtttccttcacctgttttttttttttcttcctttcttggttttccctgctttctttaagagatttgtttggtttgtcttttcctccatttctttgaatttttagtttgtcttttcttcattttttaaaggagtttctcattttctttttaagggcctctatcatcttcataagggtattttatggtcattttattctgcttcatctgtgtttagatgttcaggttttgttgatgtagaacccccagactctagtgatgtcatattatgctttatattgttgaatatgttcttatatggtcatttacccatcttttcttccattgggtgtaggtggggcctgtgccttaggtggttaatcttactctctcagctgggcagggtcaaatctccaagggtgggagatgcagtgctggatggtttgggtgtgaagagaatgcccccaggtctctgggctttctctcctagtggggacctccaactgggtgggcaggaggggatctggcactcacctctcttgttgtgggtcaatgagtgttcttaagttacaagagtatgtacacagggacccagagagctgctgtcaatcagcttgataatcttggtctgtgatggagctttgaggaaaacccttcggtgtgctcatgaataaacttgacaggagagaacaggactagaagacagacccctcctagtggtcagcaagtgtgtgtgtgtgtgtgtgtgtgtgtgtgtgtgtgtgtgtgtgtcttgcttactcagttgacacagacacctaggcattcatcagagcatccacacattgttttaaaaagaactttatacaacatagatatagtttagaaagcggtgtgggcataggccaaggattctttccattgactaccttgaataaatgggtaccttttctgttatttcccatgtaacttttgtgagtctggatttgaattattctgatagcttgccacattacttaagaatggatcatttcaattgcttgctactataaacatagggaccccttcccaacagttttattatctattactgtttatgcaggaatcaaatctttctcaccagttgacaatcagtttgctaacagaactcaattctacctggaagctctgtctaccatgtctttatgttttactcaaaatgtattttggtgtggttgtagatctaagggcaatgtttttgttccatgtctactgaggctcattcacaatttctaaggcacacctgcattccttaatttccaaccttctttatccatctgtaaagccaatgagatcattttgggatcttctcaagtgttgtcctgctgcataactcttctgttccttttgtgtttctaaggactactgaaagtacctaagaactagcaggataactttggacagacttattttgaaagatttatttttatctatttttgagtatgtacatatgtgggagcaggcaccagatttcagatcccatagaactagaactactttcaagcaggtgtgagctgcctggtatgggtattcagaaggaactgaggtcatgtgcaagaacaattgctcctaaactctttgccatatctaatgtaggatgtccttcagtatactgtgactacctgtttctcttattggttgatggataaagctgtttcagccaatggactggcataatttagctagacaggaaatctgaacacagagacagggaaaaggaagattgagtgagtaatccaccatgtagccacagggaagcaaaatgcaagagcattactggtaagctacaaccacatggaaatacatagattagtagaaatgggtttgtattttaagggagagctagcctgtaaaagcctaatccattgactaaacaattataaatatataaaagtctctgagtggttatcttagaagtggctgcaggaacccagtgtgcagagagaaactggtccaagtagaactgggctacatgtagaaaatttcactctatagatctctccagttccattctttagatttgaaatttgaaagactaatacatgacattatcttaaaagcctattagtatttaatgttacataactattcatgtaaaacaaacagttaaagatcatgggagatcagatgagatcaggaatgattagggtggtatggctgtagatatcacttaccaaaattgaatcaggaacagataagcaacctaaatagacctaaaacctctaaaggagatagaagcagtcatcaaaagtctcccaaccaaaaaaaaaaaaaaaaaaaaaaaaaaaaaaaaaccaaggccagatggcttcagtgcagaattttaccagaaattcaaagaagagctaataccaatactcctcaaattgttccacacaatagaagcagaaggttcattaccaaactctttttccaaggcttggtacccaagccacacaaagatacaactaagaaagagaaccaatatccctcatgaacatagatgcaaaaatactcaataaaatactggcaaaccgaatccaagaacatatcagaaaagtcacttcatttaagttttttttccaaaaaaaagatatgaatatgtggatgcctatttgttaacatatgtgtgagtttatgtccactgtcttagtcactattctattactgtgaaggtatcccataaccaagacaactcttatgcaagaacacatttaattggggcatgcttaaagtttcagaaatttactccattatcatcatagcagggagtatagtggcatgtaggcaggtactggagcagcagctgagagatacatattgatctgcagaaagagagagagagagagagagagagagagaataagaatgggcttttgaaacctaaaagtgatatacttactctgaaaaggccacatctcctaagccttttaagtcttgcaaatagttctactcctgttgactaattaatcagtatatgagcctatgggagccattcttaatgaaaacaacaccgtatgattatgtgcgtcatgtgcatgcaggtacccgtggaggccaaggagaatttttgagtccctggaactggaactacatggggctgaaagccacctaatgtgggtactgaaatgcaaccttagtcctctgtaaggtaagtaggtattcttaactgcctagcattctccccagatttgctaaaaagatttgtagcagctactttggtttctagaatatggaaagtcatgaacagttggcatggtccacaacttacaaattctccataacattttgaaagaaagtgataattgcattagatttaaagctgtaccatacctgatggaaaatgtcttaaatcatcaaaagcacatttaatattgcatgcttcatttattaaattactacttcattttaatattgctttatttgtattgatataataaatatctatattaattttgaaacatcagtttacttagttaagtttctgcattattggtatttgcagtcaactgtaaaaatgcttattgaatagtacttactaaataataatcttatcggttatttattcactattgtaacaaaatacctgataaaataagttaaggaaggaagcattttggctcatagagtcaaggaacaatttatcatggctaatagtgtggcagcaggggtatggaggggctcttcacattatttaatagaaacaagaaagacaaatgttggaactcaattggtctccttttctttgtttgctttgttctgttttctttatttcaattatttagcctgtggggtatttgttgtcacctacatccagtgtggtcattcttacacagtcattctttatgaaaatagcctcacataaacacacagttgtgtgtctcctaaggatttcaaatctagtccaatagacaataaaattcaactatcacacagtatggattatgtgtaactctcagaaaagagaaacagaggatgcagttttagagttcagattctaattttgtttgaaaatttttcataaaaattttatttgacagagatatcaacaccatttaaaatgagttatgtctgctcttttaattttactgccataaaattactgttgactgctgcactttgaatttaaaacatggaaatttgggtggcgggggacagaagtctttactgcagcaataatgttccagtggctacacatatgatgcaatgactcatatgtaagtatgaatttaaagtagcagtgttttatattctgtagtgttaaactcagatttatatttggagacctatatttatgtcaagtcatttattcccttgtatcagtatagtttacccccagaattcactgtttgtttggtgtttctacatctgtccccttcactgttctcaggacaaaagagagtttgaattttcatcctgatgctcactttgttatgtatcttgtggttgtataaatggtagttagcaaaactccccatataccactagtctagagatggctgactggagaaattagtcataataagggctatagatcagatagactgtgctttaatgccattaagaaattactccaacaagattattaagtgtgattaccaaacactcagacagctaaaatgttgtctttgagaacacagacactagatgtctagttacagacagagacatcaataaactgtcttctcttcaggagtcaagaagctgaggacactgtccgaaggaattggatttaagtgtgctctttgaagccgacaggaaatggtgttcagtatgtgccaaggtcaaaatgttcttactcaagggtaaattggatgtggtagcagttagcaaaggccatttacaatcatttatgaacatttcagatctttccctgggacactgttatttgcaataaaaaagaaagaaagaaagaagagtaatgcaaacatctcagaaaatataactttttcatttttatatttttatgatgtttttaaattacaacagtcacacctttaattactttcatttcactcttatttcccaagttaataatgtacatttaaaacatattttaaacattttacttatcttgaattacatttaaggaaacattgcctctaaaggaatatataccacagtactcagaaaagaaaaacaagaaagagagaacatgggaccctaaagacaaagattgtaggatgtcaaatgcaccctcatctgctgaccctttactgcaatagctcccaccttttgagcctgaagcattaaaaagattattgatgtaagtatttaatcattattaaaactcctgaaatgtctttgctaatatgagatttaagacttgcaattaagatgtcaaccatggcttataacactttgaacattcaaccagtagcactgaagttcttataaagaaaatatcacacattcctttccaaattgaagaactgacatcaaaaactataaatacacaaaatttactctcacaaaacacaaacaaaaatgtgaaacttttatactgaaaaatcaacaaattattacaagaaacatcacagataaacttagaagtttctgtaggaagttacatagaggtcattgctgctaagcctggccatgtttcttagttctaattaaaaaatgtgtaaatttccctttctctctttctattttttaccttggatatagcattatagctttatttttcattcagattccagtgaaatggttctttcttcttcataaagacaatactctgtggtgttcaaattatttacttttacattcttgtctctttgtcttagcatataaaacatcttgctcctataatcacttgtaatcaccatcatttattacactaagccatatatagattttaacttgtgatttggttgtttcaaatggcataatagacatgaaaacatttgcgtaatagaaatatcactaataagtaagtccttttgaacaattattggggcatctagaagaaacaggattgcttctgtgaaggtacagcctcaatttcattatattatcttgtcttgagatggcatcagacaaacccttcattttataagaaaatggctttttcattttgtgctaagttccaaaaggaaagagaatctgagttacctgatccagtttcacctagaaaatcaacagtagactctcccctgtggcctatgacttccctaaccttttttttatcatatttatatattaggcatgaatttcttcctgtgacgcatgcgacaaatttagttcagatagccttgtaaatatttttctttatgtatatggacttttgcagctactaaacttggtcagagaagcatctttttgtaataggtagctgttaattcaacaccccattactgtttaaggtagttagaataagtgactgagagtggtcttcaataaatggagcatttatatcaatgccttcactctgcaagactcaagtaatattgcagaaaagacggggtagaagaatgttaagatgtagaggaggggaaatgtggtttgaaatgttttcttaaaataacatgggtgttgcacacatgaactcatggcaactgtggttacctaaacaagatcaagacagtaaaaacttccagcatggactggggaaaggttcccaagaccccatttgtagctgaggagctgttgatggatcaaggggatgagagtagattttctctaggggttgaccatgcctcattccttgatgacacacccatgaagatatgggcagcactagttgaatccattgtgtaaataataaccaaaaataaataaatagagatttaacttgatatgacatcaaaggactaaatgctaacctcagattgaggagtttttcacctaccaacatcaaatgtagattaaatgtgaatattaaatgtagatacaaatcacagtaattcacctcttcctctgtgtgtggcatgaggaagctgctaaccactataaataactcttatggtaagaattcatgtgatgtttataattcctgtaaataagcaaatctgttggtaaagggattggtttcactctgtaataaacaaatatgagattcttccctcttatcctggttgttcttaggaaagaaaggatattatacagtccaatagatcagagtaagacactttcatgttctactgatgccttgagaaagctgcatgaagtttaatctaccttcccctaagtcacaaatgtggcttctaaggtccatctccagccaagactatttaaatggatagtaccataatttccttacaaaaatttccaccaatgctatagtggtgccacacaagaagaactgttgtgacatggtataaaatggactgtaccataactcatgcaaaaacaatcctttatttgcaagacaatcatttgtgattggtacaaatacacctgtttaactgcctaagtcagctatttggctcactttgtgaaccagaatatagatatcttcatctgttgctttcctggtattacaataggctcaataataggtaaccaaaaaataaataaaactccagaattgtcttctttgattttaacaataattaacagcagcattgtgccctagagagagagacaggtagattactgtgttctctgtcatatagtttctatttaatattcagaattatcttaacaagcttttgtagaaaaggccaaactcagtctgaggataactctcagtcctttgatgtattagccagtttctatagttctctttcctttctgttagcaaaggcattgagctagcagtacaaagcagtggttctaataaagcaatgtagccaagagttaaccttagtgtaaaccatgaacattggagaatcagatgcttccctgcagttccatcagttttgtgggccagggaatatataaggaacttctgacacttctactcatttttttccttgaaacaaaaactgttgtaaaaaccaaaatctgtaacgataaatctttctgccaagtgacctaaccccgctgccatgtgggttcccaatataacatacagagtcttaatattaattacaatgcatctggccaatgactaggatttcttagctgctatttctgtcttaagtatcaaccataattattaatctgtatgttttataaacagttatctgatcgaggatgccagtagcatgcatcctctcttgttgggctcacatggtgtctcccagagaagggaggaggaggaagaggaagagtgcaatttcttgttgtcccttcttatattctgtctgcctgttacatcacttcctgcctagatcacaagacttctctttactacatttctcagaatcctcctcgactcctagtcccacctattgtgcttccctattggccaacagtgctttattcaacaaccagtaagataaacatatacacagaaggacctcctccatcaaaaatctattttagaatcttccctacacattgattgttttaaaccatggaaaatcaaactatatctcaacatataacattaatatacacatagtatatgatacacatgtatgaacataccccatgtaacttagtaatatatacactgaacatgttacaataaaattttaagtcaaccaattttatctcccctcctagccatatttaattggaaagcatctatgcttcatgagttcttgaatgcattcactactcaactatttattgtgtctgctttgctatgaagtgaaaatgcactgcagtcaactagagtctaagttcttaaaataggacagaatggatatattcacaatgaacgtcaatagcaaattagaatatatagcatataataaatgattgacccattttctagaatacagcaacatttcaagctgatagatatacatcatgtatatacatgacaaaccagcaagctgtaaaatggcatgggcaagtcctacagatacctgaaaatccaggatatgggtaaggactggagacattcctacatggaaagcaggagcaattcttgggtatacgcatgtatgggggaaatgtgaaagtcctggagtcatgggtgcataggcaagtcccagaggacaactatttgttcagaacataggaaagtcatgtggattctaatatatgagtggttggacaagtggatgggtacacctgtatatagagatatacagaaatcctggggtcacccacatatgggagcacattgagaagtcctaggaacttctgatcagggaagaagtagaaggttgaaatgtaagctgaggtacaaaaagactgtggaccagtgtgctgactctaagagcatgggttatgaggacagtatgaaacatgcagaaattaaggaagcacagaaggtcataattgttggttttctttttttttggaaaaaatacattgacgaccagccattccaagttatctgttttgagagatattttaaataaacatgtacaatctccaaaattcacaattgaggtatgacttgggatctaaaatatcctggactcccaaagaattaataagtgctttttatattgcatgaaacctctagaggtttggtagtaatattccataatcaaatacatgaaattatctctgtcagaatgtatgaatttttcactttaaatgggactaatcagttcagatcagatttatcattaaatgaattaagatgaaatgtttggttgtcagaacattttaatttcagaattgcagatgagagattttggatgaatattagatagattagaggcacatacagaagcaatgtgactctaaaagccaaagcaaagaattcagtaacaattatgatgttggtgttacagagatataacaatgatttacagtgtctaggaaagcatccacagactaaatttgattcattggctgcccttcaattctgtgtcaatgttggatatattttgctctcctactcaacaacagcagactgtttacatattttaatacacactagatttttccctctggtacaactttatattttattgtgactcagagagacttgcaccccacagttttttgtgacctcccctgctcagcagcttgtcaaactattttagtagcatattttaaaacctctagttaaagtaaaattcacagtgttattaaaatctggcaaaaaatctaaggatagtttaagttatactctatcctatagcataacatttgagaaccattgggataaatatggatcattaaaagagttaagggaagctagtgaggaataagcaagcagtgattttagatcataagaagacagtttcagctggggtatagtagagcagtgccctttgaccttggaatacaagtggattcttttttattatgtcaatcatcaaacaacaacaaacaggaagttgcgatattaaaatctaagaatattcatttgctctctgacatattttaaaatattcttacataaaagagatatttattctggaggttgaaggactgatagaatccatgagcagaaactatgaaatgagtagctaaaacaaaggaaaaaataagaaataagttgtaagtttggacaacatttgtatccaactcattaaaaatgcccttcagagattttgattcattcttcaggtaaatggggattgactctagagtttggcacaaactcaaggatgtgggagtagggctctaactcattatcagactgcttgctccaaatatctgaccctaaaatcacaatatgttcaatatgaacatgttcaaatgaacaatatgttcattttagcctcaaacactaggcattatttcttgaattttttagaacaatcctaaatattattatgaaactgcatcatctggaggaaattttattaaagttaaagtgaaatgtatataggaaaccaaagccaaagccattgtgtagtaaaagaaaataaatccaagagtgaaaggtcaaccctttggtatttggaagttcattattttactatttattccttttacaaaaatcacttaaggtcagttttaaatagttgatataccaataaaatatttttctatgaaaaatagccaatagagctattgaaaatttatggagtgcaaatataaacattaatgatgaacaaattttcattttcaagtattttgtgtactgtttctgtatactgcttggttttgcctttatttagatttttgcattgctctgtataatttcttacatattttagatttatccccttaagatatgactatttgtttatgtagtcggctcttccctcagttttcttttcatggttagcagcccactttgttatgcaaaatgcttttaattttatgtggtcttatttgtctacttttcttttttcattcattgtgcttctcagattgtaatgatcaacaacaaaaaggaagacatgttcccaaacccaaatcatggaattttcccctgtgctttcttctaagaatatagctttgtagtttcaggtttgacattaaagtatttcatccattttgacccaacatttatgaatacttttatggaaaagaccaaattcattcttcacatacggttaacttgtttcccaacactaatgctagaaatgaatatatatttccttttggagttaagttttgtgcatggctatacagacatggatccatgtacaagcttctacatgccagcatccagttatgctggcaccatttgctgaaggtgttttctttattccattggacatctttagcttctttgtaaaaatcaggtgttcataggtatgatggttaatatcaggatcttcaattagattccattggtctacctgtctatttttgtgccaatgccaagctgttttggggactatagctctataataagtccaaaggaatcaaagacctcaacataaatccagtcacactgaacttcttagaagagaaagtgggaagtacccttgaacaaattggtacaggagaaagcttcatgaatattacacctgtagcacagacactgagatcgacaattaataaatgggacctcctgaaactgaaaaacttctgtaaggacacagttagcaagacaaaaaggcagcctacagaatgggaaaagatattcacccaccccatatcaacagaggactaatctccaaaatttataaagaactcatgaagcaagtttccaaaataccaaataatccaattaaaaagtggggtacagaactaaatagacaattctcaatagaggaatctaaaatggcttaaagacatgcaagaaagtgctcaacatccttagccatcagggaaatgcaaatcaaaataactctgaaataccatcttactcctgtcagaatggctaaattaaaaaacaacaatgacagtttatgctgaagaggatgtggagaaaggggaaaactcctccactgctggtgggaatgccaactcatacaaccactttggaaatcagtttggtgatttctcaggaaaatggaatcagtctaccatatgatccagcaattccacttttaggcatatacccaaaggatgtatattgatattacaatgatatgtgttcaactatgttcatagcagcattacttgcaatagccagaacctggatatatcctagatgcccctcaactgaagaatagatagagaaaatgtggtacatgtacacaatgggggacaactcagcagaaaaaaaaatgtaatcttgaaatttgcaggcaaatggatgtaactagaaaaagcatcctgagcaaggtaaccagtcacaaaaagataaacatagtatgcactcactcatgtatggattttataatacagcaaaggattaccagcctacaatccacacctccaaagaaactaggaagcaaggaggactctaagagaggcatacatggccccccaggagaaggggaaagggataagatctcgtgagcaaattgagagtttgaaggaggggagagggagctaggagaatgagagggagagaagaggaggggtgaggaggacataagggagcagggagttcatgtagggggaagaatagaggagagtaaaataagagatactgtaagtcaggtagccattataggtttaaagagaaatcaggcactagagaaatgtccagagagctacaaggaagacaccactaaccatctaacaaacagtggagaggctaccttaaatggcctcccctgataatgagattgatgactaattcatatgccatcctagagcctttatccagcagcagatggaagtagaagcagacacccacagctaaacagtgaactgaactggaatccagttgcagagaaggtagagtgatgagcaaaggtgtcaagaccagactggtgaaaccaacagaaacagttgacctgaacaagggagagctgttggtccccagactgatacctgggaaacccaaatggaactgatccagaccatatgaatgtaggtgtcagtgaggaggcctcagaaatctatggggcctcttgtagtagatcattacttatccctagcataagaatgtactttgggagcccattccacatagagggatactcccttagcctagacacacgtgggagggcttaggccctatcccaaaggatatgacagactctgaaggccccctcatggaaggcctcactctccctggggagcagaaatggtataagataggtatagtgttagtgggggtcagggcaggagggaaggcagagggaactgggattgacatgtaaaacaattttgtttctaatttaaattttttaaaaatggagaaagaaaaaaagaatatattttccttattggatttttggtaaaatgataaattagtagttgaccataaatgtttggattttctttgggagagctctccattattctactaaccttttagtctatttttattccaggattattttttattataatgtttttgtaataatagtttgaaactaaatattataatgtcttcaacttttttcttaacactactctggctctttggaattctttaaggttccattttatcttttcttaatgatgcatgatttttctgttttactggataatgttatcttgttaatagtttgacttctaaaatctaggcattccatgataaaagtaaaatcattaaaaaatatttaccagtctatttttctacttctttcctacttctacaaataattgaaagttattaaacagttgtcatcaaaaatctttaataattatttaatactaaaatattttatttttatgatcgtaaaaatcctacttgcatacatattattcattaatcaacagttaaggtaagtgaaaattaatatttaatacagacattcaacaccatgaaattcaaagattgagaaaaaagacaaaaggtaaattttagacaaaattcagagaatctttccagtagaaccagatgatataatctgaaatatatttcatgtttgtccaatcagaattattcaagtgtgtgtgtttgtttatgtgtgtgattgtgtagacaatgataatgttctatactttctatgtgttattaaaggtgcatacaaaggcatatatgctatgtttctctctgatgaaaatatgacacatttcattttggatgttcttactattttctagtactaactgtgatctcagctattggtcaaattatattgaaatgtcagagagtggaatcatggttttacaacattttggaaattaacatttaatgcacatgtagaaaagattatttctattatgaaaactgatttcaccactaaggaaacactttgcaagctaatactttaccgtcactctagtactatacaggacatattaacaacaacaacaacaacaacacacacacacacacacacacacacacacacacacacacacacgagtgacagagacaaagaggggagggtgctcttcaaattacctgtgtaacgaaaagacactggcttaaacctgtgctggcatgattgaccatcttccatgtggacctctgtgttaaagtaaatacaaatcttaactcttttggtagagatattagaaataatatatttactcaatattttggcaacagactttgaattaactaatgttgattcaagtgaacaataagtcctttgcagattttgtttgtgtaggtgtagtaggcagagattcctttcttatgatgctttcccaggaagtctaaaaatatctgcatttgaaaatttggctgttttttttttaataaaaagttagtatctaagagggtcaaatccatttgaaatatttatgagcaattaaagcaaaaatgaattcacaaaagtgaatttgaaagtagagaaattttgaacccatctttctactctctcttaaagcacttaaggctttaagtttctggtcttccagactgatggtcaatgcagtgagtatgtaatgacaactatttattttgctataaaatggcatctcaagaaatgcacttcacctaatgtattcaatgcctgacttaggaaagcatttgtttttgtcaaagttgttggcttctgatatttgaaagggcattgcattacatcaacctgtcttttatattttatatacagttttagtttcaataatataggcaagaataccaagtcatcgaaaagaaataataatgaaagcaaggttacatcatcatgtggctttccctctcctcctacatttcaatggctctgctcacaccagattatgctggatctttgagcatatatcatctgtgacatggtaggatgtccagcaggcagagaggagaactcagagtaagctcatgatgacacctaacacaaacaggatggaggatgaagacacaggacatgcttctaatagaatctttaaagttatttcattcagaatatggggaatccagtggaaggaagagaaatccttcacctgagaatgagttttgctccactttgtgttcaccacagtctatagacggtggccactccagctggaaagtagccacctcagacatgcatggtaaaactgtctctaggacagttatttttgtcttgagaacttgaagaccaacattatcatagtctcatgttattaaaatcatcatgtaagttggtacatttattgtataatgaataatgtaagttaaatatgttttcttagtttgttctgaaaccaatactaagcttattaaattagactgtgactttggtcatgtactgtagcaagattcttataaagattaatctttatttgtcctgaatttcttccattttcaactttaaaaaattgacaacataatactgaataaccaactagggaacttcatccctggggatactaaatctcctgctcttaatactccttctttacttgtagttctctgtctaggaaggggcccttgaggtcccgccaacctccatgttactaggtccattaatgttgttcctgtttcaggcaatattgaaatagtatacaaacagtgatattaaatggacttaccagattttatttctatattgatgtatacctatgtatgtgacaataacaaaaaagttcatgtgagagtgaccaggttaggggaacatgggaagtgttgaagggggtcagggaaagagggaaattatgcaattataatttaatttaaaataaaaattaatatatttctgatgctactataatacactgatagaaaaacataaataaaatagctattaataattgtcattgtcaataaatgtcaattgcctaaaataaaaagaaagagttggattaaaaacacttttgcattacatgctgctcgtaaggtacttgtggacataattttgaagaaaattaaaattttctgaggtaatatattgataacaagcttttaaatttaatctgtggttccaagttaaaagtataatttttttactgcttctatcagtaaatgtctggtttcaactggcaaataattaagaaaatattttgttttaaatgacagctaatataattcatctcatggtttaaaagcttttttgccataggatatttaggtctgtgcagaagttgagaatgtattttccacaatcctctgtgatcaatttaatgttacaatgtcctttcattcaccatttttgcttttccattttcctttgattctaatgctgccacatctctcttctcacttattgtgagagatattcttgtattttagcctgtcgtcccttctgaattcatatcctcctgttattctcccttataattcttgtacctcaatctatgactcctgctaaaacctttcttgcgctgactgcttttaagagcactcaggccaagggaatatgacaagggatgtgaaatagcatttaagctcattaaataaccctgaagttcccccagtggaatattccattatcaagctttgattaaaagatttatgacattttgattatgaatttagaatgaaaagtcccagaaaatatggaattacagagcccagaagtcagctgcctaatccagaatgatttgaaactaacattaacactattcgaaccagcattcaattttaatgaccaatttacttcattttttatcttttgcctaaaatgtaactttactagaggaaagaagctgcacttggaaacttcttgtgctaatgttcactgactttagtgagttctgagtattgaatttgcaatggaatttgatcacatgaagagaaagttttgtatgtttttggtcagaagcaaagataaattttaaggggaaaatgattatttaatgtccctttgacccctaaatacacacaatttataagtaacttataagtggaaagtgtcagtttaaaaagtatctataagagaggaaaatctgtcatgatatccaagtacaaaaattattttaatattccatgagagcagaaattatccaataagcagtgacatagaaggtaatgcattttcaatgaggattactactgtgataaagaccttttctgtagtgtgggggatctgtgcactgagaactccttctaaagaattaaagagatgcaagatattaaaaccatacctagtcacacagtagaggaactcattttactgtgtatttataaaatattgttgatgaataaatctaaattattttaaagtagttttataaatttgctattattgtaaagaatagtataaagaaaatgttgaagtttgcaaccatattagactgatgcatttttccacctttattattcagccaattttgctattttgagatgtattagaatccagagtaagtggatgtatcttcatcatgaagctggtttaacatgcagtatctactttcacccacaagttcctgactatgaagcgtgattctcatacattttataatatcatttattgaaaagttgatgacattttttaaaaggtcagaggaaattttttttaatcagaagaaagagccacactaccttgcaacaaatattatattatattatattcagttgtcattttgaacctgtccatgaaaaagataattaataaaattgacatagaattttacaactatatagttgtttttctttttatttttctttttatcttttatagacagggtttctctgtggctttggaggctgtcctggaacttgctcttgtagactaggctgggatcgaactcatagagatctgcctgcctctgcctcccgagtgctgggattaaaggcatgggccaccactgcccagtcatgatgtttttcttcagctggtatattattaataagtctgaattataaaaggaatatgatgtaactttcactttatactctatttcaattatttttatttttaaaatatcttttgataggacacaaaataatttcgtttcagtatttttcatatacttataataaatgtgttgaccatctgaaaactaagtaagctaccttcattcaatgaaatacccaacttctccctgtatttcacatttcaggaatgtgatcaaaacccaaaatgaaaacacagttaacttctccaaaaataggatttgttaggaattcttcattctacttacctagctagaactcttggtctttaagatactctacaaataaatctctgaaaataatcatagtaattctatgccctaacttggggtttgaaaaaaaacaatttatggtttaatatgaagttgttacacatttattttcatctttgaaaaatagctagacatatgcaaaggcaaaataattggaagttttgacaattattgcatggacttaaatggttatttttgcatgcaatacttaactataaaactaaaagaaaaaaactccgtactagaagcagctatctgaatgaaatgtgtagcataaaatgcacatggaattgtaagtagaagtagtactagtacatagtacaagtattagtagtatgctttaagagctcctgtatgagtaggtaaacacctaaaagaatttaatttttatttcttggaagataccccattcttcaaaatccttggacttcggtttggccactatgtcagggttgggaatcaaacccaggtcctctgaaagagtaacaaattgctcttaaccacagcaccacctctctgggaccctatcttctatttatttattttaagttaacagtttttaattgacctacaaagtaatagatttctacatggctttggttaaacatctctcctcaccttttcatctacattattgacttcatccttgcttaaacactttcatccccagtatttttccttatttctatctatagttcttagggtttttattctcacaaaaatagaatatttattgaactatattttcaacaacaggaaggcatttttgaatcacatactggtatgtcatattctgcttaatttcttttgtgactacataccccatgaccttgccctgcctccaacccttcacatgtatagctttactctgtctgtcttttctccctaagtttgtgtgattcttgtaaatctttaatatttttctatcaatttaggcattactttccagatattttgaggcatcctaggtcaaggtacccaatgccaatacttccttaatgtacattttgaaagctaacttattacttgtgtttacttactctttgtttattaatcatctacttggtgccagatattttggcaaggaggcagcattacccaaactagatagagaaccttctggtgagaacaaaagttctatattcttttttaaaaccagcatagattctcattatctgggagagtaactaacatgtggaaataatcaaccttgattcagtagataacttaaataatattcagtaaacatggaaatatatagattgaacccattgtcattaaattcttatgtgtcgattcagtaaaatcaaaagtacgaaacagtaactcattctgtgataatgaaagtgatcttaaaagtttactgtgctcagtaagaccagtgaaattattgcctaggaacaggacatgatgatgtatcaaatgtggcataaggaggaagtgtaaagcagtggccaaaatttgttcattgtgccttatacctggttgtgaatttggagccccaagacctgctcattttcaatagtttcttgtatttattttagttctgaaatttattttgaaacttgacatggattcattcatcccctgatgcatttatctatgtccactagctgttgctatcttgatttgttcagttcattctcagttattcataagccctttctggaaacaaaaacctttaaaaagacatttttttctagtagtgttcagctcagtgggctttattttataatattctttctgtgtggttttgatgtctttgttcatcttttctttatcatgatgatcccctggcatttctttctcattcttgagaaaacaacactcaaataatggagtgtcagaggattaagccttcctgaaaatgattgtgctactgttggggcccagattctggaaagcatgagttctgctcctaaagtactcatttgtaaatttatggaacacatatctaaaaaaattctgtgtatgccaaaatatctacatatgtaaaatacctacatatgtaggtggtgtggcaaaatacatacatatgcaaaatgcatacatatacatacatatgatatatcttgctataaagatagtcttatggaacaactcattgaccatggttgtttctttcaaaccaccctaaatctctgtttactttctcagttttcatctgttattcttaaaccttctaaagttggaggtgctgtgattcattcctggtatcttccaccaccatcaattctgtgctttctaaacaaaattagtaatcactctgtgaattcatatttgtagtttcactttatttttacctcagtaccttattaccacctttgtagcctagaatttatgatgtggtcttaagtctttcaaatttgcttacatcattttaagacttgatgatattacaaatgaaaccagattgttcatgaaagattcagccaccctattagacctagtataaaactatctgagatgaatagaaaataggtaaatagctgtagtaggaggggtggagaaagtgtgctaaatgattatgttattcagtccattactccacaaacagtgttttatatttattagctcattttatgcacacaacaaacctacagggtaactaccataattattctcattattattttattttcaagttattacacaaattatgccactttggatgtatttatttatccagtttaccttcccatcatatcctctatccctttatttattatacctctattatagaccaatttctcaattgcaaaacagaatatccttttatttcccacttccctaaataccaaagtcttccatttatacttctaaaatatctctcaggttttcatcctttcctgtcaccagaagctctatgtcaagctgaaaagagaagggcagtagaataccgtctgaaagttcagcactctttcaacctgaaactcacacccagttcaggagttatccccattgtaacaattagttaattaattaattaattaattatgtatcccagctgctattctcctccctcctctcctcccagtccctcccccaccctgtctatctccaatcctcaatccactcctccattgatgttcaggaaagggctaatctcctgtggatataagcaaaacaagtcataataagataagttgtagaagactaagcatatccccatgtattacagctgggcaaggtgactcagtgtgaggagtaaggtcccaaatccagggaaaaggcagagataatccctgctcccaaggtcaggaattccacaaaaggaccaagctacacaactgtctctgtatgcagagagcctaggtcagtccactgcagacacactgatcggcagttcagtctcagtgagttcctatgagcccaggttagttgattctgtgggtttgtgtgtgtgtgtgtgtgtgtgtgtgtgtgtgatgttcttgacccctctgactcctcttatccttcatcctttcttcagcaggattccccaagctcagcctaaggttaggctacgtgtcagtgaatctgtttccatcagttgctggatggagcctcactgatgacaactcgactaggcactaataactatagcagaatatcattaggcataattataatgacatgttttgctttttttttttttactccagttgtgttaagttctgtcctaggtctctgggtcatcaagactgtgggtcctggtgttccaggcagtatcaagtgtgggcagccaaacactagctcttacctctacctgaggctgaaagggctctccaacaagcctcagactgctgcctctcctcagcatgataccaagacacacgcctttaatcccaggactcaggataaagaggtagatagatatgttagttcaaggtcatactgactacaagaaattgatccagtgctaagagaaacaactcagacactcacacaaagatgatctcaacacatggtatcacacacctttaatcccagcactagagaagtataaaatataggagcaggatcttcaataaactcagtatcaggattatctcctgccatgctaagcagccgagtttgtaaggtagaaacctggcacaagggaatctcaatccagaaagtcagataagccttgcattacaatgagaccagacaacacctagctgtgccagatcttgacaattatccaaattttctcagagtcccctaaatattccaacatccccagaaaacaggaagaagtctagagaatacagcaatcacattgtcaagaagtggggtgaatggtttttgtcattcagtaggttataaacgtttatcatttaaaggggttggttacaagttgttattgttcatggtcaggaaaagagctgaacaaagtagattagattcagggatctcattctgcaggaaaaatggagatatagaaatgatgggataaaagggtgcattgttgaatctacttttaaatgactactcatgtcaaatatttttatattaatatggttttttgtatgttgatagaaatttaaggttattttgttatattataatgtgtttctattcttatttaaggtattgtatctatatagctcatttaaaaatgtagtgtaaaatttcagtccttgaaaaccatttaggataataaagaaatatgggttaatagtcatgtataacaatataattagtcatgttaggtatgttttcagtattatacaaatatctattttatataggtgatcttaaaattcttcaaagacatacaaaatatggcatttaaaatgttttaataatataaggcttatcatgacagtgagacaggtctgatcctggaagcaccaatttacttcaaaaaaggatgatgggcactgaagaacctccacatggggtttgctttcttaggggtaaaagctagctactgggcaaagaaactggctttgtctgaactgctgacagtatgtggtgtccaacctggagaaaccagacacataaaaagacaactgccaaactttgccaagacaaggtaggacagtccttcaaaatatcttcttcatgaaaacttctgccagatatttaggcccataggccaaagatgtatgccaaaacattgcagaggaactttggggtgactttccaggcagccagatgtctctgtcatttctatagttttgcaagttgctttctctgaacttcttacttactagattaatattttatccttcttgtgtttctagtggggattgaagactagattgttatagttatacagttctccttgctaccaaattcagaaaagaaacttacataagatttaaactttataaagttgaaaaacataaaagtttaagttgtttgtctaaataaattttaaggtctaatatatttttaggagagtaaaacaatttatgacaaaaaaatgatttaggtatggatcattgaactaagataaatagtggagtattttctctaaattttctaaatacaaatggactggacatggtgaatataattcttatatgataattgtttttatgacatacagttttactgtgttagagataaaatctttatttttatttagacaaacagggaaaatattcttttaaattgtgtgaatatgtgtcactgtgattgtcttaataaaaaactaaatggccaatagctaagcaggagctataacaggtacttctggacagagagaactctgggaagaagaaatgaggagttgccagcagatgcacaggttacagacattcaggagaagtaaaagccatgattcacatggcagaatatagattaatatcaattcattaatttcttataagagcttgttgagacaagccaaggctaaaggcaaaacttccataattcataagaagcctctgtatgtttatttgggagctggcaggtagaatagagaaagactggctacatagtactaggtggaaaacaaatatattacttagtcactgatattttcaagaagaacaaacaaggagagaaaatagcatgtccatgattaaataacttggttaaggcagttgaagattcacagcttgaagatatttgatgtcattttttactctcaaaacggctcatcactgccggtgagtattgcaggtatgcacatgtgtgcatgtacatctattccgtttgaactaattataagcaatttttgcctttaattctcttatccttttgcttcgtggtagaaaaataggatgaagtttcacctaatcacattttctagtacagtaaccttgaccatgaacacagaatgctcagtaaactctagaaattattcatcctacaaaactaaaactttatacttgttgaacaacaactccccacttctcttttccctcagccacaggcaaccagtattcaactttctacctagataatttcaaaattttacatcttgcatgtaccttacagaatagaacatgtcctgtgatttcacttatgcttcctctgaatgatgttccattttgcctttaggttttttcccctgatgagtgataacatgagtattttcctatatacctgttgccaatttctgtgtcttctttggaaaagtgtttgtccctctgttttgtttgtatttagatattttggctttcctcttgagttataggaaatcttggcatcatcttcatactgactcatatcagataaattgtctgggaaaaatgtgcacttttcttgtcatcttttctgtctattgactgctgttgcagtcctgaacttttcatttggtgcttgtgctctagatttatgttgcttgttattttggagtcacatataagaagtaactactaaggttattgctgacacatttttctctatcatgttctaaatggttttgaactgtcagatctcacaattaaatttttagtccattctgagttgatttctccttgatttggtcaggatccaattttactcttccccacacatacacatctattatgttaatgtgccttttgaagagaacatctgtctctgctgtatgtccctcatcctcttgtccacaaataatgattaacaatatacaatgttgatttctagcctctttgtacttcaatgttggaagatgctcatattttattccactgttatcatagtctattagggttgttgtaacagaagtgtcacagattaagaagaataactaataaggatttatttatcatagttcagtgaactgaaaaccttccactggcaaatcgacatcaaggcacagaatttagtgtctataggagccacttcttaggtcacagatgcctgccatttttgtcttttcatatagccaaaaagggctggatagttttttatgacttttgaaaccaagacgaataaacccacgtatataagacaaatatccatgactttacagcctctgatggccttattaatatcactacatagatcgttgaacttaaaatatacagatctggagaggaatatccagcatatggggaggatcacattgttctaactactgtaactttggaaggtatgttgaacttggaaagtggcttttctccttatcaagactttgtggtaatctgatctacccatctttgtagcaaaacattcaaccaatattttgatatgtattacactgagtctctagctcacttggagccatatagacactttgttcatttgaagttatcttgtctatgaagaaaggtgttgtttgttgttttttatcttttacctttgtttatttcttaagttttctccattggtatctagatgttttttatgtagaatacatttaattccttggttaagtattttgaatattatatatgtgtgtgtgtgtggagggggttctgatactgggaactgaaactaacatatctgctctattatttatattttgaggctatgtctcactaagtttccccatgctggcattatcttgtgatccttctcctccagtctccccagcaaataggaatgcagggctgagccaccagacctggcttttgatggcattttaaatagcattatttattacttcggttttttaggaagtttatgtatagaatcataattacataaaaagtctgaagatatttgtaaaaaagatattaaattgataatcaaacatctttcaataaacaaaaacattggcatctggcaagatggcaccacagataaaggtgcttgccccaatctttgaaacctgagtctgatgcccagaacctgcatggtgagaaaaatttcccacaggctgctctctgacctacacatacaaacacacacacacacacacacacacacacacacacacacacacacacacacacacacacataaatgcacaatgtgtgcataaaagtataattataaaaatatatcatcatgattattagtagctaattttgaaattatatctatttgttatgattgaaagaaataatgatattccctagtgaaacagtctttaactgtgaagaaagaaaccttggagtaattcactctgacactctaagctctctgaaaactgtttgaagcaggaagaggcacgactgcaccttataaagtactttaccaaattttttctctcatccttggtggtgaaatcagtaatgttcaggaaaagtcacacaccaaaaacttactgaattagactatttttctagattttcatgaaatgagatatgcttaaaaacatgtgggcaccctacaagctgaacatgattgtgtctttcctgttccaggttattccaagctttattttattttattgtccagaatccaattcctaagattccattctgtttacccttcagacggttagcaagtgccatctactgattgctgcactttttaagttagagcccttctacacatcaaacaagaagcaaaataaaacacatggcaggggtggggtagataaaacacatggaaagcacatgaatattactttaatgaatatgatttttaacataagccaccttttaactttttatttacatagcccaaacttgttaaatagaatgctatagaagtcttatgtttcaacttttctatggggtctcaaaacaaagaattcttattcaacaatttcacttcaaaagaaaacacaattgtatgtgactcaatttagtccatttgaagcattcaataaaagacctgtcagatttcaaaatgtgaacatatgagttgtgtatcaacatggttgaagaaaaggtgactgcattaaatccaatgaccttgctaccttttagtctcagtcttagagagcaaacttgttttaattagcagtcagcaagcagactgtaacttcactgaaggagcattgaagaatcactgcctattaacaacccagcggtaagtaagccagcacaaatacttataaccaaatagtgtgcattgcaggagtggagaggattagctattgggcacacaacacagtggaggaaattgctttattcccagtactgctgggtaccaggaggcaatcactgtgcctccagcccattaacagcattcagagtgttgcttcccatagaaggggttattggctaaccactgggtgaccaattaaatgctatgaataagtcccaaacccagcagcatggggcctgtttgtggcacagtggtatcattactaaagtgaaaacttgatgagaaaggaacatatttaattatagaactatacaaatggctaattaggaccataaagtgaaatgaatgactttccagtggatttttgaatgttaccgataactgctcagcttctttggagaccatgaaagtgatctacagctagagctcgcatgtcatggtaatggatggatcttcattagagggagcgtttttgacctggttgctcaggtagcatgggttctaaagacaatccttgattcctttcactgtgagggttcttccactccaaccccctggtctctcatgagttccgcttgctttcacaataattcttatgggtttgaaagcagaaacattatctacaatagtcactctatcagttggaaaactcaatcacaaaggggtgtcactaggttgtggaaaacgttggtccatgcttcttagttttattaaattctagttaatatctgaaaatttgcagctactctttgttaatccccgcatctcaattgttaaaacagcatgaatcttttagatggaaaagttacaatttcaactgttcctgattagtgtcagtgtttaaatgaggggagacattagcaatctatgtggaatcacaaaaacatagtaggcagattgattctgactgtcaacagttagagaaaacctctgtttgatattgtttgtgggttttatcctaatattttaagttatatttaaatagaatttattctagcttgttcaagaaaagttaaataagcatttacagtgtacaaatagctatactaaccctgtttggaaaatgccctactttgtagaattgggaatgtgcctacaaggaattatgtgcatctagtcaataacaaaatatcaaataaagtgaaaaaccagagaccccaaatgcttaatattaagtgtatgcctttgtttatagtttattgataagaaatacaattgtcaaacccctggctctcccattccaagttctcagtgtagtgtgaaacttgtaaaaccactttcatccaagatttagtgaaaatcactctactggctgagcttataaccagggtcactgggaactccaataaggcagcacagaatctctccatttggaaacatagtatatgctctcttgtggtttcattaacataatggtctagatccagatacatgtgttcccacttctctttcagagaatgatggggaagcaagatcatgagaaatttgattggatcaatttctacttaccacaaggattatgacattgttggccaattgctttgtcaaaattcctttagatattttcttgatattttaatctaatgtctcaagcaagcttaagagttctgaaacaaactaggatgcagacatgtctatataaatcactctctgctcataggaagaagtgatgtctcctgacacttacacatctccaggctggagaagcccaggatcttcctgcccagctaatttccattgagttcagacctttatacacaagtaaatttctcctttaagatgcaatttctcttgtgaatatctcactaattttgccaaatacccagtactgtttatagaactttgaaaacatctcttataatttaagagctctgaccccaaaccctaataaatcttttttttctcgagcagcaaagggtttctattgattaccataatttgctttactctcttgctattttggcaaattttaaggcaagtagagtataaaattgctacatgctaattatctatctctgatatatttctctttaacatcgtatgtgctactgcgtattttgcacaggggatgaagataaaaataatctctcaacttggttgtagagtgagtcttctcactgcttcagattctgaatagtgactttatgtctgctgactgtatccccaacttcttattaacttcaccaatattactccattataggcatcaagtcaggtaaacttcatattcagctaaagatttatactgtcttcactacttaaggctcaaataaatattaaaaacatttgtatttttgtcaacatttcacttaaactagctaactataagagaaacattgaaatgtaggacaaatagttataactataaattcttaacatttgctgactcacttatattatttctggatatagccctgaggcacgataaagaagaaattatcctacataaacaccctgcaaacaatttatacactatatacacatacacatgagctcacaaacacagactcacatgtccatatagcaaactagtatgttcgtgtgtgtgtgtgtgtgtgtgtgtgtgtgtgtgtgtgtgtgtgtgtgtgtgtgtgtgtgtgtattctccattagtatgtcctgtttatatcctttaataaagcattattattatcttttcagctgattctgttttaatcccttttgtcaaaagaaaattttctcacttttgcttactttcccataaaataaaaagatgcaaaaagtccccaattgcaatgatctgtataagtcagaagaagagacaaggcctctgtatatttacatttaatgttgagcatgtcacattagaataaatagtaaactattgagtgcacaattgtgtggggggagggtaagttccaactgtgaaagtcataatttcaaagacaatattactgtacagattcctgtttatggtatatagatgttaggtatatcaactgaaaaaataatatatgattatgacattccagagcaaccaacaagagtttgccgataaacttgttaaaataataaaataataaaatgttgttgtgtaacatgccaagagaaatatgaacattgtaatactacccagccatatatacaaatgtgctcacccaaaaaacatatataagaactatgagaaaattgaaataaatacacctgtgagatcaataaaattttacagaggcattaaatttaattctatatctcttgtccgtcaatataaaacttgaaaaatgacccactagatccacattttaatataacctgtatacaccttgtaagttgagtttaagtcgcagaacccacatgagaagctggattcagtttcatctgcaatcccattataacataagaaatgagaggcagagaccatgcattctccaggaagctcacaagtaaggtggcctataatctcagtgacaaacacataagaaattctacatcacaaacaaggtaggaacctgtaactaactcttgacagctgtcatctgatttctacatgagtaccaaggcatacatatgcctgcattcgttctctctctctctctctctctctatatatatatatatatatatatatatatatccacacatgaacaccccttcacataaacataaagaaattgaattgattttttttcagaatagtagtaatttaatttattattaatttatcaaatataataagataaaactaacacatcagtattgaacaaaaacaacagtggcaaatcctgaaaaccataaaccaggaaaaatatgtccactgttgtaaggatcatgaatgacttggaatttaataatgactttctgattgcacttcaggccatctccatatgaagaactcagaactgataagttaaacttgtcaaagtttatgtctatggaggtcatgggattgtagcaaataacttactgctgctgtatgtttaaactgagatgatatcaaactactctctaaatatttgtgtgtatacccttaaatgagtgttgctttcagcttgagccagggaagtttctttttgcaggggctattcatcaatatgctaaaagcaagtgactactgagattttcactctaactcagacaattaactcatctctacaaggttcactacatcacggagtaagaaagtgtaaagagttaatacatggcagatgggaaatattgctataaaatgctttcttctgaacatgacgggaatgttgaacatctgatctcactgaaggagtggctacctgtgcaagacctgcaaaagaatccttttcattgttaatgtcctagctcttcactttcaaattacctaattttcctactgtccttaccttaaagtagtctatcatccaatggatctttctagtgttctggcttctacaggttatgcaagttggaatttaatgctaggagccaaattatccttttatattgggcattagcattttcaaaagccacagtttcaattattagttttatagcttctgaatatgatagcattatatttgctgctgatgaaagtatttgtaagaaatctgagaatgcttccttagggatctgtataacttttgtaaaagattcaatttttctttactgttctacaattctgtcccaagcattcaaagctgctgaacagcaaaaacccaagaggtgatcaccatattgacattgcctttctaagtagcattaatctccttctccaagaatttgatcctgggagatatccatatcttgctttaaccttttgttcaatatacttaggctcttccctgaaccaggaaacctattgtaattgtggccaaggttctaggacagcattaatcaagtctatccagtatataggaataacttttataaactgaccatgtgtttatcatctgcttcacaaatggtgaatgcatgccatatgacactacagcttccttaaatttccctaaatctaacattgtcacaggcttccaattacctcttgttttgttttgttttatttttgatttttttgtaattttatttttattagttcaagttaggaacaagcttgcttcacatgtcaatccctcctgcctcctccctctccctcctcacaaccctctcctccaacctcccacctgtctccccatcctttctccactccccaggttgggtagggccctcgaggggggctcccccaaggccacctcatcatcctgggatgggcctagggcctctccaatgagtccaggccgagatgttggatgggctctcaaaatcccttcttacacccaggaaaaatactaattcacaaccagggcccccctagagtgtagaggcctcctcattgacatccatggtcaggggtctcgatcagtcctgtgctagccttccagacagcagtctgggtccatgtgctcccccttgttcaggccagctgtttctgtgggtttcaccagcctggtaccgaccctttgatcttcattcctccctctctgcaactaggttccagagttcagtacagtgtatatctgtgcgtgtctgcctctgcttccgtcagccactggatgagggctctaggatggcataacaagtagtcatcagtctcatcatagggaagggcatttaggctatcctctccaccatttcatagattgtcagttcttgtcatccttgtagatctctggaaatctccctagttccagatctctcctcggacctataatggctccctctgatatggtatctctcatcctgctttcctctattctttcccagttatgataagtctttccatcaaaagccgctgagccccaccgccacatatgtgctttacgtcagctgcctgcccaagttagggcccaaatgaatacaccgaaacttgtattaagtacaatgctgacaaggactcctcatctgttagctcagtcttaattatcataaacatatatattttataagacttatcttatcggatgccttgttggtgtcctcccttgccagtggatcacatcctgccactggagcaagaactgaggggaaaagggacccttcctgtttctccttcacttaaatatgagtctccttgctatgtcacttcctgcctggatcaccacttctctactacatttcccaggatcctctttgactcctagtcccatctaacttactgtctcattggccaaacagtattttatttaacaatcaataagataaatatacacagtacattccccatcattcccccaactcaacatttctgttcctccatttcctcctctcccctcttctcctcctcttattctggcagctcccaaccccctaccctcatgctcccaattatctcaggagatcctgcacttccatttcctggggtccatgcatttttcccttagagtccttcttgtttcctagtttctttggtgaagaggattgtaggctggtaatcctttgctctatgtctaaaattcatatatgagtgagtacataccatgtttgtctttttgtgattggtttacctcactcaggatggtttcttctagttccatccatttgcctgcaaatttcaagattccattgcttttttctgctgagtagtactccattgtataaattaccacattttctctatccattcttcagttgaggggcatctaggttgcttccaggtgttggctaatacaaatagtgctgctatgaacatggttgaacatatgtccttgttgtatgaacgtgcattatttgggtatatgcctaagagaggaattgctggatcttgaggtagactgattcccatttttctgagcaacggccaaactgatttccaaagtggtcttacaagtttgcacttccaccagcaatggaagagtgttccttttttccacatcctctccagcatagattgtcattggtgtttttgattttagccattctgtttggtgtaagatggtatctcagagttgctggagaaattaccatccctgacttcaagctctattatatagccatagctctgaaaacagcttggtattggcacaaaaatagacagatagaccaatggaatcgaattgaaaaccctgatattaacccacacacctacgaacaccttatttttgacaaagatgctaaatctatacaatggaaaaaagatagaatcttcaacaaatggttctggcacagctagattcagtcatgcagaagattgcagatggatccatatctgtcaccatgcacaaaacttaagtgcaaatggatcaaagatctcaacataaatccagccacgttgaatcttctagaagagaaagtgggagataccctttaatgaattggcacaggaaaccacttcctgaacattacaccagtagcacagacaatgacatctgtaattaataaatgggacctccagaaattgagaagcttctgtaagggaaaggaaacagtcagtaagacaaaacgtccacccacagaatgggaaaagatcttcaccaaccctacatctgacagagggctgatttccaaaatatacaatgaactaaagaagctacccaccaaaacaccaaagaatgaaattaaaaagtggggtgcagaactaaatagagaattttcaacagaggaatctgaaatgactgaaagacacctaagaaagtgctcaaaatccttgtccatcagagaaatgaaacccaagtaactctttagaacttctttctttctttcctgtaaggttactggacatattaaagttgattcttttaagaccttagattccattttaactttaaatgtaaagttatatttggttctccattaaatttctctgtgtgggtctgaatacttctatgatctggtttaataagtttttctaagacctgcatcttagcactcatatcaaccaactgttttagagattagccaagaatcttcaaactagcaacaaagagtatcaaaatgataattaacagtatgccaatcccagttaagttgactttcccttcatttaatgattcatttttaaatcatgcattgcataatcaaagagaaacctaactctttcctttgtaattatgtttccaatttttaatgtgggaaaatgttctttttgaactaatttcttcctttaagaattcccaatagacacaatagacacaccaaatctgccaacaatgtcagtgaactgtgaggattagcacctctgacctgagaactatcttgtggccatgatttgaatgtcagcccaaggagatgggcttagggaaaagcctgaaagcctccttttggttgcagctgaagactatttagaaaagatacaacagaaaaactgtagaacactagaatagtagaagcccaagcaggtttaaaggcaggcccctactttggcagcagcctgagaagggagtatacagggtccatggcatgttcacaacctttgggagaaaagaagacaaagatccagatgactgcgtggtaaaatatgaggaagcagctaattcctgtgggattttggagcccaaaatcctgtagttttgcttcagagaggctacaacagaaaaatcccaaacttgctcaaaaacttggggagaaaatctaactggctaagcaagagcctgtggtaatatattatttatgatttaataaaattgtctgaagtatcataatgcagagtcagtcacacttgttagctatagaagctaggcagtttttggcacacatttaatctcaggactcaggatgaatctctgtgagttcaagaccacccagggttacaggagagtgaattagtctaaaagattaacagatcttacacctttaatcccagccctagagaggtatataaaagaacccagtgtctcatgctgtattctgatatttattctccagaaattttgagaagagaagcagtctgaggcttggtgaaaagcctatggagacaggatccgcctgatgtagaggtaaaagctagtggcttggtggttttgcttttctgatcttcagcttgaagcctgaaccccagtatcagtctctgggtcttctatccatcatttacaattggtgccaaacttaaatgtatgaattcacaaaatagctacttggagccattgacccaggtccaggcctgagctgcaggtaagaaaaggaccctagggtctcattaacattaagaccataacttataagtgaaaactcatggaactaaaaatcttctgtacatctaaagatatcatcacttgaatgaaggatcagtttacagatagaagcaaaaatctttactagctatacataatacaaagggttattgtccagattatgcaagtgattaaaaaagtgaacatcaagtgaaaaaaactcaatgaaacatgagggtctagaactaaacagtaagctctctaaagagagacacaaatggctgagaaattcttaaaatatttaaacctttgaaaatattgtattttgtcatattcatcctctcccaaatctttacccagatctatcactcattccatatctaaccaactttctgcctgtattcatttaaaaaaaactcttcatgtaaaattaatactgtctgtatgctattgggctcatagccatccattggcacaggtataagagttaacagagtccacacccttaaagaaaattaactcttcctttcttagcagctatcaattaccaacaattttccaaccagagatgggatttattctaacctccctgatccatgcagttgttttgtctggcttgagtttgtatagatattgtgcatgctctcacaactgctgtgagtctgaattttcacctgcacttttgagtctggaatactctgcacactagtggaagagaaaagtaatcatcagcctcacacagctctgaacccctgagctacaataacaactgacctgttaagatgtccactggtgcaataatagtatgaattttattgaagtaaccaaccaccttctgactggatttgagacctactccacaagttaaagctgattgcctgcacctttaacaaggccaagtgtggctagagaggtcaaagactataggacagaacctatcagtattagtgtacaaaataaatatagtattaaactaactccacaaatgagttataagcatggcaatagaacaaggaatttaccaactcccatcagaaaatatctttgttcaatagatggtagttaacaaagacagcctcatgtcaatgttcagagaataaaagatcatgtctatcagagaagctccatctagcaactgacagaaacagatgcagaaacccacagccaaatattaggcagagtttagggaatctcacagaagagaggacagaactattataggaagcaggagtcaaggataccacaagaacatagaatcaaataaccagggctcataggggttcactgaaactgaagaggcaaacaaggagcctggatggctatgacctaagtcctctgcttatatattatgtttgtatagctcagtgtttttatgggactactaacagtaagagcaaggggtgactctgactctttggcattcttttgggacccttttcatcatattgggttgcttagcccagccttgatatgaggatatgtcctagtcttattgtaatttgttaggccattttggtttgatacccctgggagatctgctcttttctgaagggaaaaggaagaaagagtagatatggggaagagggatagttgggtggagggaataggaagacaggaggaaggggaaactgcagtcaggatgtaagatatgagagaagaataaaataagtaaataaataactactatggtgtattcatctgtaagtgggatatctaaatcacacatatccttctaagacttgggggtcacaacaaaaaagggaagagaaagactgtaatagccagatgtaataggtgactataacaaatagtgtttactgaacataataggatatttatatataagaactaacttgcgacaacttgagcaagacatgtaaaatatcaagccaaacaaaatcctagagttgaggaagaatgtgttcacaatgtcatatacatagctgaagagcaatcggaagttgatggatagtagattaggaagagtctattttattaaaggacaaaacttttgggccaatagtttacccaaggtctaatagatggtcctacagccatgcacatgctgccagtaataagtggactcaatggttatttaaaaacaaagcatgaaattcagaaggaatattactgaaaaggatagagaaaaattggatgatttgcattaagaggtgggtttgacaaaaacacattacacacaagtatggaattctcaaataatacaaaaaggaaaagagaataaagcaactttgtttcatatttatatataagaactaacttgcgacaacttgagcaagacatgtaaaatatcaagccaaacaaaatcctagagttgaggaagaatgtgttcacaatgtcatatacatagctgaagagcaatcggaagttgatggatagtagattaggaagagtctattttattaaaggacaaaacttttgggccaatagtttacccaaggtctaatagatggtcctacagccatgcacatgctgcctgtgcagattgaattgtactgtatgtgtatcataaagtgccatgtattgatgttcctaaacctcagtacatcaaaatgttaatgtttttgtaataaaggtcataaaggagaaatattaaaggcaaatgagtttattgtggtgggccctaatacaaaatgacccagtgtcttacaaaaatatagaatttatgtatagctatgtgtatatggaagacattcaaagacaaaagacacaagattcagacaaccaactccatgtcagggattaaggcttataataaatccttttctgtggcccttagaaggaataagcccccaaataatttgatcttagagtttattcccttaaaaacaattcagaaatgtatgtgaataagatctcatggttaaagacacccatctgtggcactttgtagcagtggtgctaagaaactgatgaatctggctttcggaattaattaaaatggtcatactgtaagttgcatgcctgagagcattctgttgtcacaattggccttgatttcttgaagtgttggggtttagttggagtctggatgcattgagtggtttggggcagaaggcagatttttgcccccagacggacagattctatatgtcatctgctatgtgaacatgagaatgaaaagctgtctagaggataacaaaaataaaccagaaggtttcccatatgttcttattatggatcaagggaaaatgtcttatgtgagcccccaaaggagcaaagattagtgtgagaggttccatgtgttcccattgttggatggaagagaaatgaatttgttctcaaccttcgtggtggtaaaggctggggaaatggttagtcattttaaatgaattttaacatccatacattttaaaaataaggagtctacaaccatctttcattctagtaagtttttaaaaagtggatcctttctgtcttttctactatgttagagaaggaaataagaaatttattcattaagcaaataaaaaaggtcactgaaatattcagtggagaaaaacatttgtttacagccagaagttactcttttatctgtagcatgatagggaggtttcccaagaagtcctctgaagccaacttgtatgccaatgtgcatctctgagtatgatgtagtagataaactagagcttactgcaactatgaacatttctgtcattttcatagacaaccagaacatctatacttagcatataaacacagattacagagtcaaattaacaatttgaacaaactatgaataaacattcaatataagtattctccataccctaaggtggatacatttacaaaaatagtacaccttattcatgtttcaaatcattccaaattttgttgttcttcatggcaacctgatatatacttccttttgcttgcattattttctcccatggtgcctctcttttgtgttagctaaagattttaattttatatgtaagggattttaaaacattcatgaattaaacaaatattgtctcacatcaccagaataataaatatcaatattaagccacattgataccaagaaagcatgttttatcaattaaacaactgattcagaacatctacaaaggctagaatgccctaggcatgtgtgtgtgtgtgtgtgtgtgtgtgtgtgtgtgtgtgtgtgtgtgtaggtttcttttatattatttctttttctttttttaaataaaaatagattactttcatataatatatggattctccttccccagcaccctacctacccaaatccataccattttctctatcgtttattagaaagcacccagatatctgaaacaaaatagtaaaataaaacaaaataaacaaaccagaatatgagaaaatttataaacaatcagaaaaatagccaagaaacatgcatgcaaagacacacatttgcacaaactgaaatcccataaaaatacaaattagaaactgtaatatctatgttaaaaacctgtaaggaagaaaagttgcctagttgaatacttatgagaggggaaaaaaacttccaaaaataccattgagttccttttgtgatactagaggagtacctcaatgtaacaaagattacagaaagcctacaaccaacatagcttcaactgagagaaaatcctgcttttgttggttgccttcttgaccactattatcctaatctgtttataatactttatggaaaatgtatgttatcctgtcacccaataaatctaagaagatagtttataaaaacaaatcaaacaaacaaaatcactgaaaacaacactaacctgtggttcaggacccctttgtgggtcaaatgaccctttctcccaggtcacatataagatatcttgcatatcatatatttacattatgattcataaccagaaaagttagaattataaaatagcagtgaaactaattttatgtttgtggatcactacaacacaaggaactgttttagatgaagtttgagaactactgctttgtacaaaaacataacataatgggctctttaatggagggtttttgttttgctttcttttttacctataagtgtgaatatcaaagtacttttccataagaaacaactggagaagaatctactacatcagattaaggcatatgcacctctagctgggcaaatgtctgtttatagcttactatggagtttttaagaaataccaccctttgcttcatctggaagaaaataaaacttctacattataacacataacacacattttaatattaaccttcagatgtgtatacttattttacaaatttatgccccatcactttaaaaaaaaagacataaaggaacgagaaaatgtgagccaaaatgaaagggtaagtacttccagaaatgtagtttggactgagccatctccaactctattttatagcaatagaaactgatagatctagtgaacattgtgttagatttactagtgtagatgacattaaatgaagatccactaccagttgaagaactaaataaggaattttatataaaataactcaaaagaggtttgattcaaggcaataatcaagaaagtgatagaaccactattcaataacacatttgttatgtgctggttatgttaagtgaaagaatccaggcatagaatggcaatgacatattttcacatatgatgaaggtacaggatgagagatcggggtacacatacatgaatgttcctgtgtagaaagaggtgggaactttaaaccatatgtttggaggatttcagagatatgcagaaaatattggtcatggaagctagagaaaggagaagcaaagatagaggaatatctcataattggtaaaaaaaatatacttgtaaggaattctgtctaagtcattagagaaaagtacaatgactacagttcacaacaatttagtatatgttggaacccagcattatgctgaccctgccccctgacaatgggtaagacatgaatgttggccttcaggcagatacttaggcagctgaaagggccctgtgttgtttggccaagtcatggctatgtcacattttacggggttgtgtaaggactcagtatgcatgtgcaagcttcccacatgtttgctctctctctctcccctcatctcttctcttctctctccctctctgttctcagttggccaacacccccctgcatcttgtcccttcctccaataaactccacatgggtgaatgagtctcttggttcatgttcgatcacatctgtaattcaaacaaaaaaccaacagtgtatactacatgagaagtaaaagtgacgtggggaggcagcacagtcaataaatgcttatcacacaagcactgtgacttgggttttaatctgcaacacccctattaaaacaaaacaaaactggggtagtgtttatctcaggtgtggggaagcagaggcaaggggataccagaggcttatgaccaaattgtgtaactaagtttgtgagctccaggctcagtgagaaaccctgggtgcaaaagtgagatagagaactactgaagaagacacaagatactaaactctggattccacataaatattaaacacacatgaataaatgcatgcatgaacatgttcacatgaatatgctcaaaagtgaacattatcagccattaatgtgaatacatacccaatactacactttaagagttgtgagattaccaaaccaatgaataatagatatgtgagatggaaaatttttccttactttcttaatgcatatgatatacttctcaaatgtgtcaattacaattccaaacaatttaaaattatgcaaactctcaattttatctggttcaaaattgtagcctttctcttcttccttgccttgtctttcaccttgttaggactatttcttcaacacagactgtgatggagatgcttcccaaataattgtcactggagtcaagttggaaaaagactcttctaccactgtctagacattaaggaagggaagagaaaaacaattttcaatttcaccaaaattgctagaggatgtctgtctttcttaagttcttgctcagaacaacactgggaggtgtgcttgacaaagtctagaatgttgttagcacagtcttacatgccatttttcagataagggacatattacacattgtcacttagatgaaatctcaatctgattgtcagaatgcacaagtaaggttcaaatcatggacttggatatatgctcttggaattcaatctgtgtataaagcagatctatttttcttttcttttctcttttctttcatacaaattataagagactggggtgcacgtacatgaatgttcctgtgtagaaagaggtgggaactttaaaccatttgtttggaggtatgatgagcagcatatctgttccagagccagcctcaaattaaattatggcccacctgcttgttagttctgtgaatctgaatacgattttgagaaacccctctttttagtccatggtttcttataaagtatgaaaaataagcaaaatgagtaatcaacagtaactataacagtgcccaaaacacaataattgctcatatgggttaattgatgcaattgtgctagccgttgttggtattgtaaagggggctcatttcctaggagtaaatcataaagtgaagacctgaatccttgtgcatctcttctgctgtgctagctggattggggggaagtgttagttgtgctgcaaaagcaagaaaattcatatgttacttatttgcatatatggagcaattgagagacaagtcaaccaacagtttgagatttaaatgactaaaaatagatttatgttctcaaaattgacttgaaaaataaactgagaaaatgaagacatctacttctctatatcttgaagagacaactttctttagcttaactattttctgctcacatctgagacattgaggaatgtaacacttgtatgttcattctcatttcctatcttttattcactcctattacctaaagttacattacaatctactaaagtctattgtcatcacagttcaaatgttaggtacatttaacaacatagaaagtcaaggtaatttctagagtaattctagattccagagtctagaatggtgaatgatgatgtgcagaccttcttaccacctcttccttagtagtaaaagtgctcttcaaaagaatgtcaaagcacaggcattgtgattacaccttatagactaaacctagttgaaattctacattagatataaatgagaattattgtctacttctttaagcagagaacattttcttagtatgttctgcttttgctggcaaaataatagcagttgtttaaatatatatttgcttgattgactaaggtggtatattagggagaatatattcaggcttgggttttattgcttaaatattgtaccacatatctgactcctttttcttttacccaccagtccatcagggtgagttaattgattactggtggtgacggcaaagagcttaccagagggatttgctggcatctttttataaataaataccatcatggcatatgaaaacagaatgcccaaatctggttatactcccaacttcccatctgttgtttaaatacaagtggccactggcatatcagtctttggcatatttcagtaaatgcaatggaaacaagttctcatgcttagttgcattagaagcacagtgcagtattaagacatagtaaccatttctatcattgttataattcccttgattacacgggcagccagactttaaaattacattttgaaacaagcttacggttatatgtgctcttagttaaaatgttcttgaaggattccaaaattctcctgcttttataggatagctcctgcttatttactttcttctttcactacccagtggttcagcacatcacttcacttaagttagttactgagaaattatagtacaaataataaaaaacccagagacagatatttggggtttaagatgaagattagtaaagcaaagcaccaaagcctccagggagctctcacctttaccaatactcagactgaacgggtgatccaccgaacctcagattgcatctcccgactgcactgctcctcaccgaatctcagactgcttcctgtgactgggctgagctcctgatagtctctctagtgatgagattaaaggcatgatctctgtttctcttttagattgattcactctcatgtagcccaggaaggccttgaactcacagagatccatctgcctgtgtctgctgagtcctgggattaaaagtgtgtgctaccactgcccagcttctatggttgtgtctagctttgcgttctgatctccaggcaagctttattagatcataaacaatatagcaccacaagaaatgtcattcttaatgaaaccaataaatggcaatcttcatgatttttgttttcaattaataataaagaaaaatcatataaattttcaatttttaaaatggttaccttatattcaaatttctcaagttagcattttgtcatatctattactatacagtatttgacaaataaactgagggcttaataactgtgtactttattttagaatagaatatttgctttaaaataacttttaaaatgaacatgataaagtcagtaagtagatacaaattaaaaatgtaattagaagcagattgaataaaagtttatttctttttaattttgaacacaaaaataagagaaaaacagaagagctatgctgctaatgatgtcacattcagtgaacatacagtgtccttttattttggctatatttgtttgtaaaataacttccttatcaaaaaaggagatgccacctgaattcagataactgaaacacaatttcctgctgaaataatcagaaacctgaatagtttcctcacagcaaacatggcaagttcgagtttgaatttattctacgaaaagcaaattcttatgttctgtcacagaagagcacttctgggaaaataaatatactaaatacctgatgccatcatcagcctgtgctgtgatttcagcagctcagcagggaggcaaaaacctcaggggaagctcttcaggagatctctctggaccaccagcccttgcattgtcctccaatgtctctgctcataacagcttttgttttttccctgtggaactggcagaattcttggttaccagatatttggtttattccctttaaaacagaaaaaaagttcaatgccctgtaataaaattctgttgtgcttggaacacaaaatacttactttgttattgttgtggtttagaagaaaagtaaatgcctctttgaaccctgcagcatgatttgcttgcttcttttctaaaatataatctagaacatttagagtaaaatttgaaattctatatgtgcttcacattctttgtgcattgtcttaccaaacaacaacaaaaacacatggattatcacaactgcatttggatttatggagatggaaaattcaaatcacatccctttttttcctccagtgtttggttgagtgttttgctgaagagatgaagcagaagtgcttcctgtcacacaggctaacaatgaagtgcatggaaaatggaataatgaccatgagtcttttttagcaacaaggtcccttcattttacctacaaatctacctaatagtcatgtttctgtcctcctgcctacagtgcagtcaagaaacatatttgccttgaggcaaattgtatagattgcttgggtatactcatcctctgtatattccctcttatttttaacttctcaagaaacaaatactgtacttttgtgcacaacgtgttgaatatgaaacaatgtataccgaaaagaaaatacttggaaagtagaaaaaaataaattcagcaaaatacttctcattttgtaaaaatagagcaataacagaatttctggatttaaaataataatcacagagaaacagagattcttcacattggtgccatgttaaggtactcaaagaactgccttggtgaattttcctcatctgtatcaaaatatgttaaggtattttcacaatcatataagaccagcttcaccaaagataagttcttcactgttttagaacaaacaaattcatgacaagtttgtgtctttctgagtgatcactgaaaatcaaatatgacaatgtacagatagctgatattaaaaaaaaagtatgggggggaggaatatctgtccccactaggccatcaacattttctcatttgcaataaataggtgaggtattacttctagtctagcctttctttatgagttcttccaagttgtttcagaaatgggaagattaccatcatttacagagacaagacaagtcagagcacaacgcttctctagccaaccttaatagtagactttgagttgaaataacacaactaggaatagaaacctgcattatagtatcatccaataaagtaatcaaatagaatgaacaaagaatattgttcaacatgccagagactaagcaataatgaaaagaaaactctgcctaagttttaccagaaattatgatttctagtagtctaagcacaactccaagcaaatatttagagataatataatttgggcatgcaatgtggtttgtccatgagttgtgaagttattgggagccaatgaaacttcaaggtatgccttgaagataccagaaaatggaaagatgtcccatgttcttggataggtaggatcaacatggtaaaaatagcaatcttgccaaaagcaatctacagattcaataaaatccccatcaaaaccccaacacaattcttcacagaccttgaaagaacaattctcaactttatatggagaaacaaaagacccaggatagccaaaacaaccctgtacaataaaggaaattctggaggcatcaccatccctgacttcaagctctattacagagctatagtcctgaaaacatcttggtactggcacaaaaatagacaggtagacatatggaatagagttgaaaaccctgatattaacccacacacctatgaacacctcatttttgacaaacaatccaaatttatactatggaacaaagagaacatcttcaacaaatggtgctggcataactggttgtgggcatgtagaagactgcagatagatcaaagcctatcgccttgcacaaaacttaagtcaaattggatcaaagacctcaacataaatccagttatgctgaaactattaaaagacaaagtgggaaataccctggaattatttggtacaggagaccattacacaagtagcacagacactgagatcaacaattgataaatgggacctcctgtaactgagaagcttctgtaaggcaaaggacacaatcagcaagacaaaacagaagcccacagactgggaaaagatattcaccaaccccacatctgacagagggctgatctccagaatatacaaagaactcaagaagctagtctccaaaacaccaaacaatccaattaaaaagtggggtacagaactaaatagacaattctcaatagaggaatctaaaatggatgaaatacacataagaaagtgttcaacatccttatccatcagggatcttactcttgtcgaaatggccaaaatcaaaaacaccaatgacagttcatgctggagaggatgtgtagaaaggggaacatttttcctctgctggtgggagtgccaacttgtacagccactttgaaaatcagtatggcgactcctcaagtaatggttattagtctaccacaatatcaagcaattccactcttaggcatgtactaaaaagaagcacattcatacaacaaggacatctgctcaatgaatttcatagcaaaactatttgtaatagccagaaactggaagcagcctagatgcccgtcaactgaagaatggatggagaaaatgtggtacatttacacaatggagtactaatcaacagaaaagaaacaatggaatcttgaaatttgcagggaaatggatggaactacaagaaaccattctgagtgaggtaacccaatcacaaaaagacaaacatgatatgtactcactcacatgcagattttagacatagagtaaaggattaccaacctacaatccacactgccagagaagctagtaaacaaggaggaccctaagagagacatacatggttccctggagaaggggaaagggtcaaaattccctgagcaaattgggagcatgggaagaaggggagggagctagaagaatgagaaggggagaagaggagggatgcagaggacataagggagcagaaagtttgagtcaggggaagaatagatgataacaagaatggagataccataatagagggaaatattttaggtttatagagaaatcaggcactagggaaatatctggagatccacaaagatgacaccagctaacaatctaagcaacagaggagaggctaccttaaatgccctccccagataatgagattgatgactgacttatatgccaccacatagccctcatccaacagctggtggaagtaaaagcagacacccacagctaatcaccaaactgaactggactccagatgcagagaaggatgaatgaagagcaaaagggtccagaccaggctggtgaaacccacagaaacagctgacctgcacatcggagaagtcttgttctccagactgatagctgggataccagcatgggactgttccagaccctatgaatgtggatgtctatgggatctcttgtagtagatcagtacttatccctagcataggtgtggactttaggagcccattccatatagagggatactcgctgagccaagacacacggtggtggtcctaggccctatcccaaaggatatgatagactctgatgacaccctatggaaggccttaccatccaatgggagcagaaaggatatgtgataggtagggttttagttgggggagtggtcggggaggatgtgagggagaagggaactggaattgtcatgtaaaacaatcctgtttctaattcaaattttaaaaaatctgaaaaaaaagaaagttatgtaattgggtatgttcacttaagagattttggatcatcaggtttgtttgctattctctaacacactctcctcatccccctctccatctcccaaaagcaatatgactgtggtggtttgaacaaaaatggcccccataggcttatgtatttgaatgcctggtcaccagggaatgaccctatttgtaaggattaagattagaaggagtggcttggtgataagattagaagggggaattatgcctctggggctggactttgaggttgcaaaagccaatgccaagcccagagtctttctgtctcaacctggggatcaggttgtagctgcctgctactgctctagcagcatgcatggcatcatcatgataatggactaaaatcctgaaagttaaaacaagttaaatgctttcttttagaagagttgtttatatcatagtgtctcttcacaaccatagaacagagactaggatgatgaccaagtaaccatggactgaaatttcagcaaccagctactaaaataaggccctctcttcctttaaaattagatctcggttaatttgttacagtgatcacaatcataggaactcaacacaaagatttaattttagatattccattttagaatggcggaaactgaaatagaaagataaatgaatatttttcatatactatagtaataaatcttgatggctatgtataaatctaggcagtgcaattcttggaatgcttggccattatgttgtacttctactcttcctttccaatgaaaatgcactatctttatcaatactttacagatgaagataattgggtttagaatggcaatgttgcctaacttacatttcaaggtcacagtgctgaaatcaagcccaggggcacactataaggtgctattctctaatataaatataaattcatatatacccttcctcatggggctagaacttcattcacttttacctatttagttctgtaaatgttaccattgtggacaccaacaaattatttttcctcttaccacctagatcctaaaatataaaatcagaagtcctatcttctggtccagctgttagactaacaatgttgaaatactgcattgcatagcagctgtatgctgtccttgcatatattagtttgagtaaatgaccatttattttttcattatatgggaggttgcttttaattgtatgccaaaaattagcaatattatcaagtggacttaaaatttgttttagcattaaatttccttcatttgaacatttttgaaaggaatgttgttctgggatcacagttggggtcactaatatctagaagcctttgcatttattatgtaaccctactgctgagttccctttgatttctttggtattaaattctagacatgtgaatttggaatgaaaaacattgacccttcagtaataacaaatctcaccaattttctttctcaggagtacaagtcatggaaggagatgacaaaatgcgttttgtaagacacttactggaaaaccatttttaatgtcctcatatatgaagaaaagttgaatggaatccaattaaataactaaactgtgctctgagatattggaaaggaagacacctgaaaacagcagcacagcactgtcattgcttagaacactgtcaatggaacaggtttatgactgatgactgcagtgacatctttggaactgcctatacactttcctttcttagaactcccttttgcttggtacagaggagaaaaaaacacctcaaatgctgttcagaaggccaacacccgactaatcaaaccctttatgtcaaggtaattatgaatctgatttcttattgacccaatgatctcattacaaaattgaacagtttgatgtggacaggcacattttaaaccatgaatagctatattagaaaatattcttttcttggtaataggaagtcatatagcaaacccagtcataagaaatcatccaggagaaaaaaaaaacaaaaaacaaaaaataacctcccaatctgtggctaaatgtagaggtaattttagctattatttacccactggcaaactctcctaaggatgttacctcaccataaggaaaggccaaatgttaagtacaatcactttgttcctacccatcaatatagcattctctgatacattatactgctgtctatcatcatgctatggaattgcaaaacttatttcacagcaagtggcttattaaaactccggccatcacacagcattcctgaacactggcttttcaattttgttgttgctcttgattccctcttgcatatgtatttgccgggaaaaccaattaccagatggcacatggttatttttacattttgtatggagggcttccagctgataattatgacattacaggaagactcctgtgcattgctttaagaggtttttggcagaggctgtcctaagattttcatttgactttacacctcttgactgaaggatgtttatgaattatctgtagataatttccttaagtatcagggaaaatttttcctttttcttaaattgagttccgtaagcatactgtgcgtaaaacaagaaactctgtttttatcagtaaactagtagatgtttgaaattttctagttcaaggtagttcaggacaaattgtcaaagcaactgtacatcacaaaagccaaagtccagctgcccacatgttactggggtgatcagaactgtcagggggcatctgtgttagaggaaccagccttctttctttttcattagctctcttgctttaatgcctctgacggatgttttaagagagagaaaagagaagactgaaagcaaaggtaatagtacaaaatgactataattacaattatgtagtagtaataaatccagaattgcggtgtaacacactggagtagagtccagccttaaagcacattggaattagaattaataggctctacttttcttagtatcaaccctcaatcgaaaggcacctttcttcatagagaaacactgtcttgtgttcttgctatgctaccaaattagaaacttccttacagttctttaattatgcttttttaaatgtgggagtccgtgatattttgttgaatgccactaatattttccttttgatccacttctgttataagaaatatacatctctctaaatacatgtaagaattttgctgtttcagtgagagtgaaggatggttatcagagcaacaaaaattaattctgtttgaatttactatgcactttgggaaatgtttccctaataataatatacaatgttttttgacataacatccttagatagctttattaaattgaagaagaaatttaaaatttttccccttgttttgataaaggtaaaatgctatgtagttgttaggaaatttatccccaaagaataaaagactcagtagacatctctgtgcttccagactgtattcctctgctcaaccccagtgaaagtgaagcatgaataatttggcagtgctgtctctgtatttgcatttagctcacatacattaagctaattaatcatgttgtgtcctaactccttagcaaataaattaactattcagaaaaccagtagcaaagtattcaagtctttaaataacatatgtacccaaaaagtatttgattccaattctatcttaagtaaacaaatatttattgatatctgatgcttttattaggatgatcctctcccttcacaagcataatttctatctgattaatatggtgaaatctcagtccatgcctgctaactgttcacaccattaaaacacctctttctcataaagaaaagtaggcagtcagagtatctttaacaagcaaagctcattagaagtttgatagactcaaaaaatagaaggtgataaggcaatggagaagaaaatcagggttaataattatttctttgtaatttctggtattaaatcaacttctgaagtgactgcacatcttctgtgctttaagtcaataaaatatggccagcattgctgtgttcattgtgggcagccatgccacatatcctcttgtccttctgaactctgattctgaagattagcacttggcaacactgagacaatgcattcgtctgggaagttttatagtcattggttcacaggaagattctgattatattggacagggtcaagatactccttgacattatctttctcccattccctgttaaggatacaattcgacagctatgggagagatgacagggtccatgtttgaatattttctctataaccactttaatggaagaaaatgatgggaaaccaactgaggccgatgtctaatttaaagatgcttttccaaattaaggcttaccctttcacctatagcactatatatccttattcatctttctcagtcgacttctgtgaatcctcgaaacattcactatcaaagcagtctcaataaaacttataggagtcttaaattaaaatatgtgttcaaaatggatagtacatttcccaaaaagtggtgttcatgagattggaaaagaaaacgcttgtatttttttaagtaatttgttctgttaaataaagattaaaaatgggataggtaagtaattatcagccactaaatggtcagacaagagcgcatatatcaattcagacaaggatgttaattcactagtgaacagtcttttataaaccaagaaaatgatattgttatcccttttttatagatgtggttttatagatacttaacctttaagataaaagctaagaatataaatacaaaaatattcctctgactattctaatcatatcttcaagactaaatgatatcttccaattaaagataaatttataatgtcataaatagaattctttctgttttgtttttttttgaaacaggcctggctgtcctggaacttactttgtaaaccagtctggcctcaaactcacaaatatctgccttcctctgtctcccaagtgctcagattaaaggtatgcatcaccgtcaccaagcatcaataatatttttattaacctaattttaaaaaattgattctttaggaaattcatgtcattcaccccaatcccactcgtttcatagtcggtccatttccacctgacacccttataagcttcctctaagaaaaataaaaataaaataaataaatacattttaaattaaaaaaatcatttcttccatctttcccacttctccatccccttatcattgtagtggcactggaagctgtgctgtggcgcacagtgtaccagcttctggcacaacatcaacactagaccctcaccaaaacttcccttggttatcctgctcttgagtcatggagatcggcaggactgatcccttcatgcactccagcagatcacagacatgatagatgttgggcagggcctgggtggtagctgagctaagttcagtcaaggcctgcatcagaactgccctcctcaggggagggtcagggacagatctccagtgcccatgccactggacccaagctcttctttgttcctggtgaaggtagggtagaaagaaacagctttgcatgttcaaggccagctctcccaaaccattcaggccactgggaccagttctcttgggagatggggcatgggaagctttcctgatgaggcaacctacaaagggagagaccagttctctggtgctagaccactgagggcaaatcttccatagcccacaggacaaggacatcaacacagacctgggctgcagtaggtagaaccacaggccagacatggtcctccactgcaactctggtgtagacattaccatggcccttgatggcaacacagttcactcatatcagtattgccttcagacaccaacatcgcctcagatggccacctagaccccagttatccacaggcctctcagtggcaatgtgggccagggacatcacagaaacccaagcggtggtctgagggagttgacagagtatgggaaggaatgatctttccttttgaaagtatgagcagattttacaaccatacattattaattagacaaggtgggttataaaaggcataaattttggaagggttgttggaaaggggtctgaaggagttgcaaagtgtaaatgaagatagatctcatcatacttcattatatgcaggtatgaaattttcaagaacaaaaattattattattttaaaaataaaacataagggaaagaatttttccctatttatttttttaaaattgtacttatacttaatatgttaggaaattataagaaaattccctaatccctagcttataagttatagaaaacataatttttttcacccattctcagaaagtccagacatccataaagagggtaactgctagatccaaccactaattcataaatgacactcttggctatgcactcagcagaaagactacacagcttttaggtacctcattaataaaggcactaactttacttatgggagacagcactcatatggtacctgtctgctcctgataccctgaattttggttgttagtttccacatattaatttttagattataaatattaagtttgatatattaaatgcatgcagaatttttagcattggcaacattagtctagagtgtgatatttagattcgtgtgtttcttgggtatttgtcatcttaaggtaattaacatatttcatgttaaaactttttcattatcttgtggtatgtacattaaaatttctgtcttttaactactaagaattttgtgtttctaataattacttttattaatattttgagccatagaacacctgaaacagcagaacaatgtctattaacaaatatgaaaattctcttccacaggatctgttccttgagacaggattttactacatagcactgtctagtctagtccccacttcaaaagtctttctgaatcctcctcctgagtgctggaattatgcatgaatgacaatataccaatttcttctcttcttttaatcaaaataagcattgtaatgtttactagttctctaaaaaactaagatcccagacacttgaatttggaagagtttgctgttaagtttcaaaatcttgtaagttcctcaggtcactgagaagcatagatactcacattctatgttcattacatagcagcaataatccagatgcatatttctcatgtgtgtgtacacaaatacagaacgttctacacaaggcatatggaacaactgtcctttggattagagcttttctttggtctggaagtcatttcaattctttcttcacaaaatgaatagtgccattctgggtggccccaagcctgcttggactgctgctgctgtttcctggcatcatgtaactatactgcatgtctcatgacaaggtcattgcctagaaggttttgctaacctttttgtctgtactgctacaacacaaatctgctggcttgaccattgtgaagaacaaataacattacatctaaggctgaaggcagacagaaacagaatggggcatagacaaaaattctacaagatgtagccaaaaggttttgtcttgttattgaatactaaagagagcaacatttcaacactgctgagagtctgatgaaagctgatgagcgtaatcactccaaccctttgggatcaacaaattggaaaaaaaattccccactcctgctcttacaaatgtattctcatgtatttttatttattgtagtttaaaatttatctagccactataaataaaaatgaaattttcaagtgaatggatggaactggaaaatagactaaacaaggtaacccagagtcagaaaaaatcaaacactaaatattgttcaatatatatatgttagctcctaatctttagatttgagtatataacctgaagtaacctcagaattcaggaaggtagaaaggagtgaggaggaagttctagaaaggaggatagtagaacctacatgctatgaagaaggaaatatgcaagatgggactggggactctagctagagaaagtaacatggagaatgaaaaggagagataaacagaatgactgaaaacagccataaagaaatgtattattatgtaaacttatttaaatgtacattatatgtgtgtgaaaacacataatttaaatggaattatgatacacagggtgataatgctgcccacaggaacaattgcctaacctgtaaattccacattgttaagcatgggaaacatccctttgagttgtggatcagagaaacccactcaccaaacaatataaactacaatcataacccttgactacctacttcccagaactatgagataagattctattacagagtacaccacatgttttagactcttcttggagtgaaatagatggagctgacttggaagagcctgggaacaattagaaggtgctatgcaagctgccaagagaggaaaaacaatcactagtcaaccaagttatgatacccattatacacaggaatcaaagatattcccattggggcaatagagtcactattattcttggggtaactcagagttttcaaattggactcaataggaggtaattcatggctatttctgcaaacctaacaaataactactagcattttcctaaattaatagttttaaatatattgaaagcacttatttgtgtatccacagataaatgtagtgttcattccttatccaaaaatgttcattttgcaacaaatggagactattacagatgagcccactgataggttatctaatactgaggggtcacctctaaatatatctgcatgcaagaaacgtgtacttaaaaacaatcaattgtattaaaaacaataaaataaatttgctgaatgcacagaataagtgaacatagtgtgcccaggccaagctgttacaatctaacctctatatctaaggatcagggataattatggaagagggggtaaaagattgttaagagccagaaaataagggtacctacagctgaataccatcttgtagacatggcaggggagttaatcccagagaatcttgagaatctggttgcctaagcaagaactgcacaattatatcactgttgatatgcaaattagatgaaacaaagttcataaggtcccagcactagataaagagctatatggtcaatcatttgttgctgaggaagagaaaattagttttcttcttagatgagcattgataggttttcaagttccaagtggtcagcaataaacaaatttgcatgtaagcaacataaaatgtacccagtatatctatctatatctatctacctatcattctatcatctattttatctattaacctatctacaaatcatctatctgtctgtcatctatatatgtatataaaggatgtttctataaatgaaataaacataaaatatatgtatacatagaatgtttttctacatatacatatgtgtatattttatattcatatatgcagctctaaaacatatatgcatattctatgtaaaaatatgagagtatatcatatatatatatatatatatatatatatacatatatatatatatatgcaacagtaatagttaaagacaaaattatgaatctgaaaaggattatagcagggaacacaaaaggcattagaaggggtagaggaaggtaggtgaataatatataactaaaacgcactcatgtacaaaattttcaaaaaaataaaaataacaaaatgtgtaaaattagaataaaaacgatctcaggaaaatcctgaattacaaaataacttcaatgcagcagggatcttctataacaacatttaaagagtccacatataagttcaaggacatggctcacatccttaaggagacattaagcttctgatttttctagtagcatgcactggagtgtgtgatgaaacaggagaggaagaaggaggcagcaatattgttctgagggtaattgattttgatttgagatgctccttgtgaactggtgcattgccaccttaaagatacaagtaaggacaatatgacaggctcatcttccaccattacttcactatatcaagtatgtttcataaaacatcactgactgaataaaatagagctattttgacattaagttgctaaattgtaaggcaggcctagaaaaaagaggggcgggatttttcactcaccttgtgtcaaggaaacattgtgagcgatctgtgtatgtgaacttttttcaagattttcattttctttctataaatactgagaaagttcaaaacaaaaattgagattaaacaaaaattagatacacgaaaatttcccatgttgttcataaatgtattcttgtctcccagcccagcaaacatcaaatcctaacagcaaatattcatttattttgtttttagtacacatttatgtattaggtagaaaatgaataaaatactgctaaaaatatccctattttctagcaactaagttttatgagatgaaagataagtacgaaatgaggctgtaaccatggaagaaggtaaggcctgctaaaaataaaataataaaaaaatggcctgcctcagaacagaagcaccaattaaacaggggatatttcagccaaatcatcagtttgagaatatgtgttctttttcccttcagaatatattttgacatattgccaaataacagtactttccctactggattgacaaaattaactaattgcttcagcttcacaagcttttggaaatgattgttgggtattttagttgtacagagtaatgggcttcactaggattttaagcaaatttggcaaacatttccacactcgcaggtgggttacttctgctgtctatgagacaaatgtgtggagcatcttgtggtttgttcattgtgtgcagtctgagtgttctttttctttctgtctttaatcacttcttgagataaatataaagctaagctggccttgctattatcagccagctctaacatacccaccctaatggactacatttggggtaggaatccctccaagaatcctagatgactgtgttgtgttctgtttttcttttactttttccctttaatacattacttccattcctatttccaatttgtccctttcctgcctttgacataagctgtcactcagaaagctactcactcctggctgctattcttgggagtctttcatctaaagcaagagtgattccaaagtgtatcatcctttggctggctgggagtgttaggctcttacacttaacatttgctcagattaacaatgcagaaaaataatgaaaatgttacaatatagaattatttatatgcataaacgatatgtgcaattcaattgtcaatgagtaacttgacaattcttgtataaacagacaaaagaaagtttagagcaaaataacatgggtgacatttaactccttcatgattaatcaatcagtaaatgcattattttgcacctgttgcaggtgtaatttgctgtgctgggattatctttgtccttgagatttctaagaaaaatattgagtaagtgaaatgagggttatttttttgttgataaagtaaagagaaactcacctaatggtgatttggtttggacccagaacataatgtgtatgaaagagtattaaaaatgctgaaactttgttttgctgaagaaaaagttacttttgacattttgagtcagttttaccagtcctgtttataagatatttttggcagatttcttggccctacccactagatgccagcaacagccctgcagcttatactggagaaaccaaaatgccagaataccaaataccctctagttttgaggcacttttgcagataatagtatgtctctgtttaaggacattaaaaatcacagagagagagagagagagagagagagagagagagagagagagagaggaataacaaacctggtatcttaaaacacctaatctggacacatgataaaaactcactagtgaagatttgtttgttggaattaatagtgttaataggaatggttgactatagaacagaaagtgccacaatttacttagtaaccaagattaaacttgtccagtcttaaaaccaaaaccaagcaaccaactaaacaacaacaacaaaaactggccatggcttttatatcatttcctcctactacagtaggttcatgaggaaaagatcagatttatatgtatttttttagtcaagttcaacactaaatttattcattttgtcaacttccatggaaggactttggagcagatgttccaggaaaatgtgtggatgtgtttatattaggagaaacatgtggagatgagacaggagccaaatcatgtctgaaattggatctttcattcactagctttgaccttgagtcagacaatatagtcttttactgcctcattctcgcctatagcatgtgtgtttgtgggtagtatatgggtgtacatacatatatgggcacatgtacaaggagttagcactgagtgcttcccctccatcactttgcaccttaccttgtgtggcaaagtccctcaactaaactgttgttcagcaatattgctgggctggctgccagtaagaccaaagctcctcctagctttgcaacccacctagcactgggagcaaaatgttccttcactgcagactttttatatgatttctgggtttctgacccagttcctgatttttgggcagggagcattgttttctcactttaatacaaagcagataaaactacctaccgcctttataaaacatggtgaatgggtgagcctgcaaagttctcaaaaagtacctagaatgttatatgaccattgtaaataatagcttttgccatttttcagatgaggacatcaaagtagatgaacctcactaacagaacaaataaagaaatttagtgtcgaaaagatgttcctgctacaccctccttaatgatgtgaccactggggccatttgtctttacattttttgtatcaaagtataaaatctagcagtcataaaaatattatttagatctaagcatcctaatcatcctctcatcttctgaaattctaatgtacactctccacatgtagttgagttaccaaaggttgataaccatagaaacttattgtgttacaagcaaaatgtcaagtgatttcactttttttctaacattttaatttcagaatcgcctaacaaaccaagagtagtgcatcaagttccctctgtcttttccttaaagtttgatcaatggtgcattttgaaaaacaaattgtatttggctgcaggttatatcaatcagaattttgaaatgtatacacctatttcctcctgtatgaaagctgtggttactcaggagttaagatctcttattttgcagttgtgacaatctgtgaatttctgttttaatgtgtgattaccccaagggacaaaaggtgccatcagcgaatgcatacctattgctgaggaactgctaaataaaattaatgtcttcatatttactaaccccaaacacaaacatattccctgagcatgggactgtgaagagaccgtgcatctgaacctaaagccctggagacaactgccttgtactataaagaagatcacaatttagcaacatctggtcttttcattaagctggaaaaggtagaagagatgaaagaaaatgcaattatttttgacgctaaagttaattggagaatgatgacacagcagttgggaccatcaccttgaagatgtctctttccactaggcttccaatgaccaagggaagaataaaccaacgtacactgccaaacttatgctgagtgaaagtagattactcctgcccttgagatccatgcatgagtggctgggctacaaagaacaagctgctgtgggattttctactccttccagagctctgaagaacaccggctgttagtctggaacttggggtgattctgcaaagctttaagaaattgcactgctctgttcctggagactggggacaaataaaaccagatgacctgtgctgtgtttaatacccaacgctttcctacaagggataatctttgcacattaaaattaaagacttctagatactaatcatctagtcatgaacaaaggcaaacagcctccagccaaccttggcactcctttccctatattccttctaactagagactcttagtgcctgcagttatgcccagtttccaggcatctttgttcacacaaagctcacaagctttattgtttgctaataaaacaaaataaaagctaaaaacataccctaaaattaagtcatgcttgtacaaatccaggtccttatattttaggagtaagttgttcacagaaaaaaaagaaaagaaaagaaaatactagccaggcttcacagctaatcactgtgctaatcagattcagatcatacatagctatatcccattgcctgtaagggaaaccactcaagaccttttgtatatgttttaggataccattaattttatcttgtgttggagttgcctcccttctctcagtaactccatttttactaagttgtgactgttctttatagatctcgacaattgtgaatttctagaaaggattccattctgtcatgtgttccacaacctactcttaaataattgccaccaacattcattgattgcatgctatatgccatgcatatttcatgtgatgtaagtcttcttttattctggtaacaacatgtataaatattacccattttaaacataagcaaagtatagctgagaagcagtaaatatattattatattattatatcatatattattatatgataaaatttccatccttatctttagtggataggccttacgtaaagttccagaatattgaatgtgagacaatgaggaaaagagttttcaggatctctacgaactatgactcttgaatcagatagcaaagatagacaacatgtcaaatgacattcagatcggaagacactttttataacataaaaatttatttacttatctatttatttttaaaacaaaatttgtatcaataaaatttgtcagtcaacattctagcactacagttaaatacccgagaaaagaaagcagtaaagaaaaggcctgattttgactgacagttttagaggatttagctcatgatcatttagctccattgctttggttctgtgctgaggcatctcatcatggtacagcaaagtgtggcagaataatgaaacttactccaacagcaaaggaagaaaaaaatggtgaaacggtcaggatcattttgccttcatcagggataatttctactaatttaaggacctcctccttataaaactataccactgaaacatgcataccacctcataatagcacaaacttgaaggtcatagcttgacctttgaagggacattcagtatccaaactagaccacatgtctactgatttctcagggttttattgtgtttctctccttgtcaccacaacaaaactcatccctttgctggaagactttaggaaatggtaccaagacatgtgtttaactgatgtttatcccgaggctaaagcaataattctgatgcttttttatttctattatgtgaaccactattttataactaaagtaacactgaatgatttccagataattcccatttctttcaacgttatgaccctatgcataaatcaacccagttttcatagccctgctatcaaaatatggtgggcatctgtactatataaataaatgacaaagtagtcctccaatttcaaactccatccctgaatcccagattatccacatcatttattttctattaggattctaaatttcatcaccagcaggtcttttgagacatctgaaatacatctacattggtactcttgcttctgttccttgtcctacaaaccatataggaatctttgagtgatataaatttaattatatcattccataattaaaatggtctacaattctctacatgtgtatattatctatcaccatccctgatatctctccttctatattgcctgtactccactggctctgctcaccttggatgttttggattttagttctcgaagaactgcttagatcagtcatgcaaatctcaacttactcagtgtcattttaaagaacactctgaatgcatgggtgtaatgatttcactagacccaaaataaatgataaatgggtattttattggggaacaacttacacagaccaataatgaaccaccacagtgtttctctgcccttctgattagatccttgacccaagagagagaccacttttccctttctgtttctgcttctatccacacctgaattcactcccaaaaaggtgtgcccactgttacaggttcataggcaagatgccactacaacacttctcgacaaacaagtgctgaaacacagcagttattccctaccatgtcattctgattctctgactggcttcaatcggtgtataaaatgggtttcatctcacttgactttctggatttaatctccttatgaggaaagttctcatttctttttttcccttgaatattcttgagattaggtaaaaattctgaataagtggatgaatgattcatggttagagacagagtgtgctggtctaaacagaagtacctaggctataaaaggtcagcacaggataatgagagtaataatattgttgttttttcttttactctagccccttaacagaatgacaaaaatgagtgggttgttttttattctttgctcttactcttttgttctttgttctttggtctttgggggagcctgtcaatgctcccaaagaaatcacatctggaggtttattattacttacaaatgcccagccttagtttagcctgtttcttgctagcttttcttaacttaaattatcccatctagcttttggctctaggctcttttcttttcttgcttctgtatatcttgctatggtgatatcttgcttgtacaaataaagcctgcctgaagataaaaggatggagcttgttaccacctaatcatagaggtctagaagtctgtacagacagacaggaagcgagatgacttgacagaaacaggaagtgagaaggctaagcacagataagagagcaaattcctgtttcttcttgcttatattctctcactgcccagccctgtctgtctgtccacacctctatagttagctagtggcaagctccatcagacaatattcagacaggctttatttgtacaagcacattattaccatatcttactttcattcttactccatggcaggctgggcagctgtcccctgatatcttcctttccttccttttttttctcccagatatctactcctatttattttctctgactgacagtcccacctatcccttctctgactttgctattaggcattaagttctttattagaccatcaggtgctttagacaggaaaagaatcatagattcatagagttaaacaaatgcagcacaaacaaaaactgcatctttacatcacgacaacaaatgttctagggcataaacaaaagtaacacccctaaaaataatatcctacaacataataccttgtagacatttcatttatcttcctgctttctgaaggtattgaataatgcaaagtcatctaggacatgaaactctcaagaactaagttctttgtgaccatacatccagtattatttaaggtaagcttgttgtagaaacatgcatgaggtagagtgattctagaaaatgagtaggcagcatttcataaaatgaagcacacactttatgtctgttgaaataatgactttctcaccatttaatgtagaaaaataaaaacacacatccccaaaaaccaatgcaaatgttaaacaaaagctctatttatactaaaaataacccctgaatgtcattcatagatgaatagacatgatcatttcaaacaacagaaaacaacatcacaaagcaaaggagtaaactatatagtaatgtcataggagtttatcaataatattatgctaaatgaaaaagctgtcagtcttaaacaaagaaaagtcaaagaaatagtatcaggggtcatagacaagggcaaggtagagtgcagaaggaacctatgagtgtgactggcaacgaatgaggatcttttttttttttctttctttctttttcatctttttttttgttttttattattaattcaagttagggaacaggcttgtttcacatgtaattcccctctccctctccttctccctccccttacccccattccttctcccccacctccaacctaccccccaccccatccacccaccactccccaggcagggtagggcccccaaccggggctccaccaagtccaccaaatcttcctgtgctgggcctgggaccctccccatgtgttcagagacagagtgcatcccttcaagtgggatgggctctcgaagtcccccacatacaccagggcaaaaagccagtccacctccggaggctcccaggagtgcaggggcctataccctggttctttccatggcttcagaatttcaatgaattataagcagaaaccctttattttatcatatgatagaaaatatcatacaacaaagcacacacacaccacacacacacacacacacacacacacacacacacacacacacacacacacacatattatatatatatatatatatatatatatatatatatatacacatatattctataacatggaagttacagaataggcaatgtgacttgactcagaaactggaacaataaatgtgacagtctcttatgagaacaaacaaatctgtgtaccctaaaggggtgtcaactctcaccgatgttggaacataacaccagtaccacagatactgagatcaacaattaataaatgggacttcctgaaaatgagaagtttctgtaaggcaaaggacacattcaacaagacaaaatgacagcctacagaatgggtaaaggtcttcaccaactccacatctgacagagggctgatctccaaaatatacaaagaactcaagaagctagtctccaaaacaccaaataattcaattaaaatgtggggtacagaactaaatagagaattctcaatagaggaatctaaaatggcttaaagacacttaagaaagtgttcaacatccttagccaccatgaaaatgcaaatcaaaacaactctgtgataccatctcactcctgttagaatggctaaaatcaaaaacaccaatgacagtttatactagaaaggatgtggagaaaggggaacactcctccactgctggtgggagtaaaaaacatgtacagccactttgcaaatcagtatggcagtttctcaggaaaaatggaaatcagcctacctgaagatccagcaattccactcttaagaatatacatacccaaaggatatatattcatacaacaaggacatctgtttaactatgttcatagcagcattatttgtaatagcaagaacctggcagtcacctagatgtccctcactgaagaatgaataaagaaaatgtggtacatttacacaatggagtattactcaggttaaacaacaacaacaacaaaaaatggaatgatgaaattcacagtcaaatggatggaactagaagaaaccatcctcagtgaggtatctcagtcacaaaaacacaaacctggtatgtacttactcatacatggatattagacatagaccagccagcctacaatcagaaacaaggaggaccctaagagagacacacatggtctcctggagaaggggaaaggggcaagatctcctgagcatattgggagcatgggggagtggagagggagttagaagaaagagaaggggagaagaggagaagggagaatgagtcaggggaagaatagaggagagaaaaaaaaagataccttaatagagggagctattgtaggtttaaagagaaatctagcactagggaatagtctagagatatacaaggatgaccccaattaagattctaggcaatagtgaagaggatatcctaaatgcccttctccgataatgagattgatgactaccttatatgccatcctacagccttcatccagtagctgatagaagcacaagcagacacctacatctaaacactgtactaaactcctggaatccagttgcagagtgggaggagtgatgaacaaagaggtcaagaccaggctggagaaattcacagaaacagctgacccgtgcaaggggaagcttatgaacctcagactgacagctcagaaaccagcagaggacagaaccataccccgtgaaagtgaatgtcagttaggagacctaggcagccaatggagtctctggtagtggaacagtatttatccctagtgtacaaatgtacattgggagtccattccccatagagggatactctcagcctagacacacaggggattgcctaggccctgcgcaaatgatatgacatactttgatgatcccccatgaaagcctcatcatttctatggagcagaagggtggtgggatgggaggatgggagggagagggaacttggattgaaatataaaataagattgtttcaaatttaaataaaaataaataaataaataaataaataaataaataaataaataagagttaaaggataaaaagagttgcctactctcaccagccactataaaaattacaaaccagaatcaatcaacagatttcttctttacaggttgcttgtaccactaactacaagatagctcctctaaagaaaatgggacgatgcacgaacctatctacaaaattctgctgtcatgtaatgcaattttatttaaattcttatttttttgatccagtaaccccctccaaatccttatatttgaccccactggctctcaccatcgttttacttcagtttctgggatttgtccttttgaaatgtgcaacaaattgctaatatgtagaaatactctaccatccagcagcacaacataacatcttactcctgaccatagtttagtgtccagaggtaaattcaatcttttgtagtatagtcttcttaactacttaaagttgctatttatttctacttttctactttactggcagtttccataatgcagaaatattgaattttaatatttttgcattaattcctatacttttaattttctccactatatatagatgctgcaaacctcattgactaatttagagaatcatgccattctcctaaagtgggattaaaactctctttatctttagatgatagttgttttatattttattggatttaatttcctaatgatttctgttgcaataaatctttccgccaaatgccacagagccccaccgccacttgtgcactttataccagtcacccgcccaagttatggcccaaattaatactcagagagacttgtattaggttcaaagctgcttggccaatgactaggagtctcatcggttatctaagccttaattatcataaatctatatattttataaaacttatcttatcggatgccttattggcattcctccttgctggtggctcacatcctgccgctggaggaggcaaaggagaaaggaggaaatttcctgtttctcctttctcaaatatgagtctctttgctatgtcactttcggcctgatcaccacttctctactacatttcccagaatcctctttgactccgagtcctgtctaacttgctgtttcattggccaaacagaactttattaaacaatcaataagataaaaatacacagaagtacttcccccatcagttttcaacttctttttattttggcttttggtgttggggaaaatatagccatgcacaaatcgagaatttcagcattattcagatatagaactatgctgactttgaacaaaatatgtcaagtttgttaaatgaataatgttgactcgggttttttctcaaggcctgtaacattttgttttaacagtgctgtttttaattctaactggcattttatctagtttcctcagcaagtttattttctcacaccatgtcaacaatcatgtgatgatgtgatatgtgttgttgacctgttgttgcatgtaatgccagagagtcatatttcagaaatgcataaagtactactctgaaatcttttactaacaaactgttgaatttttgttaagcttctgaaagcttcatttttttatgcatggctttcatgaaaacattttaaagttcttatctcatcaaaacaatcactagcaatggggatttaagcaaagtgcatatggcatgaatgtttaactcaaaacatttaagaatactctattttgtggaaagagtatagaatacgaaaacagaacatttgatttcatgttcaagctatactactagctagcaatgccagtcaacaaaaaagcatgttgcttgttatatatactagagatagtaacattaatatcatacacagaaattttaaggaatgtgtgggaatcaacactctgtaaatctgttgctaggaccatttgcattttaccgtgtccttatacagcatcaaatttgctaaacttgcatgaagatgtatgcaatgttgaagttgacatacccaaatactgtatatttttaatacatactgaagatttcaaatatgcctagctgagcagctaaaattctataggtaaagagccttctgaaaaggaacagtgtatttcgtggaagaataacattgaatactgattccagaatctaaggagagaatgaaagacagttttagacttttaaagtgcttaaatatttgaatacacacacacacaaacacacacacacaatatatatatatatatatatatatatatcattaggaatatatatatatatcctaatgagatatatatatatatatatatatatatatcctaaggatatagaatatcattaggaatatatattcctaatgatattctcccatagtcatagattagtgccttttccagtcatcaacagagagacttcctcaggcaggagatgggagcaggtgcatagacccacagtcagacatgagaagaaagtataagttggaggtatccattggatccctcccctgggagattggggaacccctaggaagacagcagagtgaggagagattacaggaattagagggcacagaggacaccaggaaaacatggcctactgaatcaactaaacagggttcatctgggctcacgcacactgaagtagcaagcaattaccccttatgactctgtaacaggcatctctggtatatattatggtgtttctatgggactctgaacagggggagtgggtatatcgcccactcttgtgcctgttctttggactattttcctcctgttgggttaccgtatccagacttgctatgaggacctttgccttgtcttactgtatcttgttttgtcatattggctgctgtctcttttctcaaaaggaatggagggggagtagatctggtgaagaggagatggggaagaagcagggaggactggagggaggtgaaactgtggtcaggatatattctatgagaaaagaatctattttcagtaagacaaaaaagaaaacaaaaaaaaaatgtataatacgtaatgttgacaaactcttgggaaaatcccgaaataggaaagatcagtgaattcactgttaaacatctgtttaagcaaaaagttctcattcgcataatacacaaaaatgatatacaacttgtacttcctattaaaacttcttgaaacattcaatagatagcattttttctcagaggaaagaaaagtaaaggaatcaatgcaagaaactcatattaaagttaaaagacaatattttcttgctaaaattggaagacaaaagtatattagataatttaatgtgagagtggtaagatttgctttaaagaaagaaagcctcagaggaagatatgtaccttggatggagtcaggatttaactactgggtaaatcaaacaagaccatgagaagttccacatatcctagaagggctactaattgctgagaacccaaggggtcatatcagctctgaatccatgtaagatttattgatgcactgggtgttgtgcatgttgtaacaaattcaaaggacagagtggagccaccttagatggggattggatataatggcttaggctcatagttgcacagaaacttctacttttgacagtatattcaaaattatctgagaaactaatctagagaccagactagactctctgcaagtctaagagagaaagtgtcagctaaataggaagccttagctaacagagcacaacccaggccatcagaggaaattccagtttcataaaagacaagtatacctcagccataccaggatttagtcctccactaatcaccataagtgccaccactcgaagaaaaaaatgactagaattttttaaatgataatatattgaataatgagtgaaaagcttaaccaacaaactgactctaattgtacatgtctaagttaagaaataaaagctatattaaaaaccaacacatgtttcctctacagagacagtaataatgacactaatagaatgaactggaagaaatgcctaataagtattttaaaagaatgatcataggtatgttcaaacaattcaaagaagccatgaatatactccaagggaacaaaagatggttgagatgaagtcaacaaaatatgtaaaaaaagagagagaatggctgaataaaacaaaaactaaaatgatggtgaaagttaaaatgtccatgagttgaatataaactttgggtggggcatctcaccaacagaatgggccatgaagaaaataaacaaggatagaatacatggtagaaaatataatctcacacaataaaggtcaacagtaaatttaaaaacaaatgtgaccatagagttaaaaaatgtgacactccatgaaaaagctgaacctttgaattatgagcacttttgaagaatattatagtgatggcataaagaatattttcaataaaaacaaagaagaaaccttcccaaacctagataaagtaatgtccatccatgcacaaaggccatcaacacttagtcacaaccataaaataaatcctacacatatgattgctaaaatattaaaacacagagcataaaagaatattaaaatctgagagaaaggttgagacacttgcaaaggcaggtctgcagagtaaaacttacttatttaagagaaatatttaaagccagagggtcctgaggctttattgaagctctgaaagacaattaccaactcagaacaccatagctaggaaaaggttttaaacattgtccaggttgatcaaggaatatttagcaatatatgtttatctgtataatgtacacacacacacacacacacacacacacacacacacacacacacacacacacatacacacacacacgtaataacaatttatggaaaaatgtcatgaatttgaaaagagcaaggagggttaaataggaggggttagagggaggaaagagaagagagaaatgatgtaagtatattatattctcaaaatacaaaaaaaaaaaaaaactaaaaagtgatctagatgctgaagagatacttcagaagttgagagcatttgctgttcttggagaagacccaattttgattttccaatatccaagaatgttttaaactcaagttctaggggactgacaccctttcctgggcaatgtggacatcatatatatgtgtgatgcacatatatacatacaagcaaaatactcatgaacataaaataagaacaaaaatttaaaataaaagtgttaaaatctaaaaatcactgaatgagaaccaaagatttccatgaaaaaaaactgattaaagcactgtataaacactaaccaagctctacagaggaaacaggagtaatgtatctcaggtacgcttgtttcagtattatcagcctatgaatgttctaaacatttataatttgtgcttgtttcagtattatcagcctatgaatgttctaaacatttataatttgtgcaaattataaaagaaaagcagtcagagatgcttctattttcagcagattgtgataacattaacataacagagacccccccactagccaaagaatggaagacctcagagttctctgcactactacctctgagatgacaaagtttcaaaacattttaaaatattttctgtcagcagaagcccacattaaagaagagtttattataaatgaacttgagacaagatttatgttgaaggcattctcttaagattttaaagagatatatatctttttttgtatcttaaaaatatatccagagatgtatgtgtacatttacatattatatgtttatatttatgtgatatatatgtatgtattgcacatctcattataatcctcaatgataattagaaaaattggggaagatagtttataagaatcaagagatattgaatggctacaaggagacagtgtcttctggacattgtagggcattgcatatatgaattcatgatggttgtgacagcctgactatgacctttgtaaactaaagatagagcaatcccagtgtggaaaggggagctgaccacaataaaagacatttctcaaaaaaaaaaaaaaactgttaatgttagcatggatctcttttcagcactgaattaaaaccaccactaattacttaaacaagtatttattgattgaccactaagtgcaaacaataaataaactatgaatgcaaaattacaggctttcaaattattgcacatttttctgtccatagaatatgaccagacaggcctaacctccaacttagcagtagctgtctttgctaaatatatgatatttaggtttaagcacaataatagtgaggaattattataaggagaaagggatggtgcattgggccggggtgtttttaaaagtgaataaaaatttttaatacagtaaaaaattttattaaggtgtgaactataagaggtaaggcttagactaaaggaattgctactgtggaaaaataaatcagcactagttaatgttgaacattctcaatttttctcaatggtacacaatgctaaagttgtgaaacagcttataattaaatatcaaaatcaggaaattcttgagaaatcaaaacatgaagataacacaaggtaagatataaaatgtttttctaggcctcggaaatatcaaaggtggaactttacacttaaatgcaaggctgtacaagtactttaattatgttattaatacctctcaatcaccaaggtctcaaaaattaaaaaaaaaattctctcagaagaatcccaagtcaaaaaagcattcgtttctaagagatttgtaggcaagatttatgctggaaatatgctcttaaatgagattttaaaagactcacaaatcataaaataaatagcaatagtaattttctttatttagaataaaagagacagtctataatgtaaaggggtgagtgattggttatcttaaattctacagagagacagcaaactgagaaaccatctgtgagtttatttcagttaccctttctgggccagaaggtaataaaaggtaaatttggttggtgggaggtgaatcaatagccaagaatggagaatagctctattaaaggggatttctttttctatctctgtggtgaaacaccatgaccaaggcaaattataaaagacaagcattttatttgatttaagattttagagagctagagccatgactgtcatgggaggatgcatggtagcatggtgctgggatctcacatctagacccaaggcaggaggcagagaacatactggtaatgaatggtaagattccttttaaaggtcaaaatatagcctaaggcacacacatctaccaaaaagaccacactggctaagccttcctaaatggttctaccaactagaaaccaaatattcaaagatatgagcctactggttccattccattcaaatcacaaaaggtagtgaggtggaaagaccttctatcatccaagtgctcttgaataccatgtgtttcttccatttcctttactcaatcttgtcatagtcattttcttgacttcctcaaaggtgtgtgcataaagaagacaattttattttttagttcatagtaagagatgtcttaagaaccttgaacccctttaaagtacaggatcaaggatactgcgttaatgctttaaaaagggaagatgtgatgcttttggaggatatgactgatttgcatatagaaagaatatgaccattcatttcagaaaaaaaatgttatatgatagggagcctgtacaatgtctggttagtgtagactgtacttaataactatactgtaagaaatcaaggtatgtaactcagatatttgctcttaaataaaacatatgagaaatgtcagacatcctgatacacaactttaatcccaaatttgggagataataccagagataggtagatttctgtgagttcattgtgtaaagcactggactacatagtgagacactctctctcaaaaataaaaagaaaaaagaaaaagaaaacataatgagatagtccctactctcttactcctacatactcaatgtcacaatcatccttactgagtggccagcatgactaaaaagctgagattacatgctaatagccataatctgagcctacacacaggacttcaaaaagcttgatagaactgatgtcccaactaataatttgcctagaaccacataagaggacctgagcccaaactacctatcctatcttaactactcctgaattcttgacccttggaaaatctcattgagttaataaacaagtactactataatatttgatgtttggagaaattttttatagaggaatagacaacatggcaatataagattaaatgaggtaagtctgagtagagagatcagacgatttaaatttcaacccagcatgaagtctcaccccttttgataactatcacatttagtcaacgaatgagagccagtgtatagggaccacaaagaacagtatcagccaatcaaaaaaagtttacagtacaatcaatattttcaaatattttagcctttgaaaaattttatgaatcattattgctgtgggttttttgtacttctattgtatattcaacaaatgaaatgctatgtccaagtctggaaaaggggtatgtgtgtttcagactcatcttccattaagtttcctaaaagatataatcatcagcaaaaaagagaatgaagagttttgtgatggttttgcaccccagggaaacatgaaacagtagtcaagggcattttgtggtgtgaaagaaagcatggcatgcaagcaatttgtcatttcataactcttgatggagaagcttaaattgttattatcagggcagtttaatctctggggttcgtaaaaggaacaagagtttcatttagacaaaaatctcctaaatgcccacaagctttctgctttcaatcagaacaatactgaagagatattctttttcagagcctttcaagatggctgcttctggctctggccatattccaaaaatagaaagatgaaagaaatatcaccatggtccttgaaacttagtacctgagggctgcttcctcttcataaaaggggatcagaagaatttcgttctgacatcctctttcttgttattcttaaataatgcatcctgaaagtgagcaatgtgtccagagactgctgagagctaaggtaattataaacaagaaaaaaaactgtttcattattagtgtataaatttcaatacaaaaatatttagctaaggtttaataagaaaattaaaagtggcaagtcaaagctggaaagaatgttaacaatatttatacatccataattgttcatattatattcttcatgcttatactcctcaagtgaagacatgcaatcactgttcttcagtgacttcatgttcagtgtttgaactcttgaaaaataataaatgctattttaagaatatcataaatgtacaaagtatactttgatgatatcttcccaccatttacctcctccagacttttcgcagttccccctgtacatggcaccctcctaaatccatgtccctgatgtatgtatgtatgtatgtatgtatgtatgtatgtatgtgtgtgtgtatgtatgtacgtatgtatacacacacacacacacacacacacacacacacacacacacacacacacacaaaatcaatgagtacacttagcattgtccatagagaatggcaactggtcatttactagattatgtgcaacataccagtggttccacctgcaatggaaaatgactcttcctcctcagctgtcatcaacagccaatatatcatctcaggcaacttgtatatgaaaattgaaacatttttctgcattttgctatatttttattacttgagacttccacaaatacatgaaatgtgttattgattaaatcaactaccaccttccctcttaccactcttctcattctttcctattacctttggaaatgaaaacctcgaaagtaactcataaacatttgtttcatagggtattttgatagaattaaacaggtaggcctgaaagcaggatggttaagattcaaatgaacagtgataaattttgacataatacttacattcactttcctctgaaatattattctattcccagtacaattctagtgtccatactgcatgaattctccaaggtctcaatacaaatctcaatgttctggaattgttattcacactcttgtatatagacacatgggttcttagtttttaacaccttccctcaatgtttcaataacataatttctggtcatagctcctggttaaaagcaaagaatgcagccagagaaagttgtgttttttgttgttattggtggtggtgtgtttggattgtgtgctgtggccttttgttctttctcacatagcttgtttacatgctatagtacttaagaagttggagtagtctaaaccccacagtgacattaaaatattcaaaggaaatcattgaaaatatttatatattttgtgttttgctggaatttcaaactgagatgaaaacatgagaaatagtctctgaataagaaaaattctaactctttgagctgtgacattaaattcttgattaatttctcatctcagtctggaaaggatcaaggcagagaagcccacatcactgaagacagtgaaactggctgaatggaatggctctgtgtgtatgtggatttgggaagtattagattctgtatatacagctttgtgggaagaaactacattctgaaatattgtgtcctgatttctctatgcctacagtacaagctgacctagacaattacttccccaaatttaatatgtgtaagaatcagctacgaaatttgttacagactataaagtttggatcaaatcttataaatttgaattaaatatgtctcagtcacaacccacatacctagattttgaagaatggataaatagtattctcttcctctttcccattctagatgaacagactttatcctaagtaataaaccagcagcttgataaacagtgccctgcactttttcctgtctggccagatgcagtgctccccacaaactgcagcttcacagtgtggctcattttgtttccacttgggatctttctcacaacagaggacagcccaagagccttcagcattccatttcagattttccatccctcatcatttctcttctctgaaaagaatcatgccttggctgggaacctgattatattccaaatggttgaaataaagcaagtgtggattatttccatctctggaagcacaggtttctctccaatcctaatgctttagcaccaagctttaaggctatagtgagcaaaagatttggagtataaaatgacttaaaaatttatggaaattaagatgaattaaaaagattattgcaccttccaaaaatattttggttaggacagttttgggaatgtcttctttagattattttctagagtttttttatctttaaatgacaattacatggtaacttatgatcttcacagtaatctaaaaataagctttattggatgttgttgttgttgtaatagtattagatttgttaatatttctaacatgataacatgaactgctgggcccagtgtgatcaataacaacagcaaagcaaatgcagagaggagttaccaaagatgatggaaaagaagcacttggcacgcacaaaatcttggtagcacagattatcatatattcagaacatccagttagaactgtttcagctgtgactaaaacttcagtgttttcatttctgtcatatagtatggtcataaattcagaaaagtttttgaaccactgcaccattcttcccttgcagaaagcttgctgtttcaagattcctgttcaagattgctgcagttattaaataaggcaaagatataagtgaatgcattgtattaacaagtcatgacataaactttgctggcctagtcaccttcatgcttactattgagtcaccttcatgtatagtttattttgggaccaccagctcacaaataatgacatggagacttcttattaattatgaaagcttggcctttcctgttctgtactacctgtattatccaagagtattttcctctttgtgtctaaataaaaatataggtatgatagaataaaagggtagattatcgaatctgcttttaaactaaaagaaaaacaactaatctcaaatatcttggattagtatggatttctgtatatgatacaaatttaaggttatttttgttttaacatactgcatatatgtttctactcctgtttaatatattgtacctatgcagtttatttttaaaatgtaatgtatagttctagtcattaaagacctttttgcaagctatttagaataaataagaaatataggttagtagttaatcatctataacaatcaaacatgtagccacttatacatgttgtcaagatcaaacagagatgtagtttagataaatagatgatcttcaaaaacttcagagacctgcagaatatgaaatataagatgttttaataacacaaggctttttgtgacagtgaggcacatgtgtgcctgggagcgccaattcattttttttttaaggatgatgggcattgtatgaactccatatggagttttcttttatttgtgataaagttagctactggacaaagaaatttcccttgtctctattgctgacagtatgctgttcaaattagacaagcaggacacaaaggcaactgcctaattttccaagacaaggtaggaaagtcattcaaaattactgcttcacagaaaagtctgtcagctattctaggactgtaagccaaagattgatgcctcaacagtgcagaggaccttgggtgactatccaggcagccagctctctttgcgatttctgtagttttggaagttgtttgctctgcacttcctatttactcaggtaatatatccttcttgggactttgatgtggttaaagactagatagttatagttacagctgtctttgttgaaaatttcagaaaataatatttaaaaagagatgtaaagtttataaggttgagagacataagttgtttatataagaaaatgttttggagtctaaaaatatatttttaggatggtagtacaggttatgatagagggtagtttgggtatggtactttggactcatcaagacaagatagataatagagtaatttctctgaatatgccaaatgtaaatggtctggacattgtgattgtaattgtttcctgataaatgttcttattgtatacaagtttaccccattagagttaaactctttcctttttacttagacaaaaaaaaaaaaggtaaatgtcatggcgttattcttttgcttaaattagaaataaagaagaaaagaggcagatgagacataagactaagagacatattagacatattaagcagtttattataggcccggcagagtagagagactaagagagaagagaaacagggttaattcctgaccgccatggccggtcgccatagagagagaagagaagcagaagcagacagagagaagaggagacgagtagagagtgcatagagaggagtagagagagagagatagagagcgtgtaaatgggcagggatctgtcttttaaaggagtcctctgcacctgtgtgcagacttagttcccatggaaccctgggctgaacagggtactgcctgttccaccaggtaacaggggcaggacagcataatgcctgaagcattcacatgggataatctttttgtacactgtgaagatttgtcttcactaaagcaccttctggttggtttaacaaaaagatgaatggccaatagctaggcaagagagcataagcaggacttctggggagaaagaggaactggagatgaatttagacacatggcagatgccagggagatgcagaaccagttggattttctaaatgagagacagataaaaagccatgtcacagaatgtaaataaatataagcgggttaatttaagttataacagctagttggggtcaagctttagctaaaggccaagcttccatgattaataagaagtctctgtgtcattatttgtgagctggaagattcccaaaagaaagtcaaatattaattgagtgatagaggcagatagcatttcttaaatgccagcaaatgaaagaaaatttgtatgagaacaaactttaaaaatattgaaatgacccttcattttcccttctaaaactccatagcctatatggcaataataatagcactaagcttcagggtttaaaccattgtggaagaggcgttgactgcaacagtgacccagtactaaaataagtgtacatacgacacatatcatcactgatcagctataaccaagcactttctaagagtgatatggctttgtgaaggagaagtagaagtgaattagaactgtccaaatattgagattcaattgccataacacactcagaggcattttcatagaattgagtgcagatggagaatgtgacccaatgcccttatgcagcagtcctccaactccaacctaatgaacgcacactcataattatttctcaaatagattttatctaattttaaagtggataatttataccacttgtataaaatgcattaagtttcattaaaatattcagcattagtagaactttgagcagaatatatttcttggtttcacagtcatacatatttataatattaaaaatcttcagttgttttagtaatagaattcatataccatagatctgaatgctaatttcagtacactcctgtagtagaaagtgatgtgcatgaggaaaggcatttacattttatttttatggagtttgtgtacatttttgtcaattatactttctttgaattatactttgcctttcaacttgaagccttatcatttttgttatttattttttctttaacaagttaaaaacacaagatcttgggaggtatttacaacattgtgttaaagtcatacaaggggctcatcttagtcttcctccatgctctgcattatttttggtggttttgtttcattttagacctttgcctaatggctaattcatatgacaatgttaacatttgggggcaaacagtgaaacaagcctgtactttgctaggcttctgtgtcaacttggaaaagcaatgacaaaagctaaaacatggaggtaatgtttattatacatgtggtttgcttgtggcatccaggagagcttcagaaatgacaacatattcatgacgtagtaaatcatggtttggagtgttcactgacagctcttgttttggataattggttatcagtgtagtaatattaagaagtaatggaacattaagtgctaaggtttagcaaggtgtcattactggtccctcccctgactctggcttactgcctggcaagtcaataccttcctcttctatatcgcacccctattgatataatgtagacaggtttgcactcagagtcacttccatttatctggaaaataagaatctccttacaggtgaattgtgcaccaaagaacaaggctttttgttttacaatgctgtgcttctttaatttctgtatcctattgttaattagaatgcaggttgtgaataatggtactcccaaaaaaatctgcctaaagatcagcatttagtttatcttattctgatcagcaaggaatccaggcatttcatctattaacttcaagtcttctgtgtcttgtgaagtagtggtgcagggggtaaatgcatagtcactgaagtcatgtgacaaaatgacatttttctcctaggcttgttgatgcttagtgccttggagtggtatggagttcactacaacccttcagattgggatgttaaaacatctagatagaagctaaagtaccagcaacaatccaattttgcagatctttactccattggcaatctctgccaatgactttggagaataaaggattaagttaaccactccaaggggaattgaaggttggacagaggatttacttaagggagttgttgagatgagaggatttctcctactctagtagacaatgaaaacgtagtttcatcctaaagttagtaagaaaaatttctgttagacgacatattggttgtggtatgtattcctcagagtttgtagattactgaattccttaggagcttaaagaatcaaaagggacagggaagctttcactgtccaggcattcaaatgaagataaaaccaatagtgaggcaatgagagcaggcaactcatttattcagatcccaaatgaagggcttacctgaaaagatcagaagacctcagagaagtctctggatgtgtatatacaatgaattcttagatacagaaaaggttgacaagataataacttgaaatgatgtattcacctacttcagatgattctcacataataatttctcaaattagatgatatgattactaatgtcagatgccaaagtgactaagaaaagcccagccagactgtgagcacaatcttgttcctttgtgtattgtgtgaatattccaaaaaataacaataaaatcagtggatacctgctcttacttacacacaatacttgctcttttcttaaaaaagatatgccatcagtagcactatagacctgatatatgtggcaaagagaaaactccagaaacagaaaagacgtggtgtttcataaacttttcgcttccagtcataaaatcatttcaccattggatatctggagtgagtaggtgatgctgtgaaatgcagttgctctgagaagagaaagtctgggaagcagacagaacataggttacagggaccattaacatctaagtgtgaattcaaatattgccacctagtagcaaaatgagcttggcttctatcatggtaagaagatttcctgttaggatctgtctgaagactaaatgatacaacataggacaaatatcaaagcaggacctagtataaacacatggcaataatgcagttgtgaagttaattatactattatcaagattttgcttttcacagagtagagaaaaatattttcattctcttttgttggaaatcacatgggacaaaatatgaaagcatggggcccacaggctattttttctggaggggaaggcttgtatgcataaacagttctacataaccaagggggaaatgcatgcaaaatcaccctttggtatttcaatctccttaataaaaataatctaccttgtgttattttcccattagctataaaacaagatatgaagacacatttttctaccacaaactgaatgatctatatacaggctgtaacacagtgcctggcagaaagttctcaatataatgattactttagctttgtagtgttcatgttagataagaaaggtgaagcaaaaatggtcactgaagtcaaactagtttcagaatgaatactcatggtgacaaactggccgtgggtctgcttcaattctgctcagtatgccattgtggataaaaacttagagagggaattggatcaaaagtagatactggcaaagagcaaataatattcaagatttacagagttccatcatagcctacacagaatacaaagctacccaattaattttctacaaaaactaagcaacatattttattgggacagtcaacccctggtgtgatgcaatcattgcccaaaatatgtgttttggggatttcaaatgaccctattctttaaaataaagtcattgtcaaagaatgtcatgttggggatgaagaaggacggtaatttgtgatactctcatttgggcaacttccaagttatacacaagctgtcctgttacttgctttgcaaaaataaagaattgtcattattattgaaatttgccctgtggagatgagggggcaaaaatacattatctttggatgaaaatagtgaggattttagctggaagcaacagataagcttttaaatgtgcttcagtactgatttagcgtctttgtgatttcttccaagccaatcacactttagtccaatttggcaaagggatgggcacttataaaatatcctgcctttgaaaataaaagtactgaaaagcttcaaagagcatatggaatgaaatctttatgagtgtatataatacataaacccagctccaatgagcaaagtcctcataactacttaaagatatgtgtgcaaacactgacactatttttacttgtttttcataactattctctaattaaaatgtcttcttttattagaagaaaaatgttgaaaacatacaaaagctgtttcacttctctcttctctgtttcaccaagttaactaacacatgtccttcttagaatggagtgagaattttgaacttctcaatgtttactgtaattcatatttctccacattttagcaactacagagtttacaatagagaaaataaatattttgttctttctcagtgctttaaatgattttaaatgtgttgcttctccaatgtgtttctggagaaaatttcaagtaaaaatatttattcatgtttcctcaatttatcagaaatagttatgattggttgaaggaaatttttgcctacaaacagtctgtgtcatgactcatatagtattacttgaaaagtaaattaaaattagagaattgaaagtagttaaatttacactaaataggaaataatgaaacctgggaaggaataagtagtcaatagcattgaagttggaaggagattcaataggaggaaaagtttatggctcataattaagggaaaaattattcaaaatggtgttagaggaagacttgcatgacaccaatctccattttctgtatgaaatgttgagtaaaatatatattttctcctaggacctaaataaatctgccttctttgaatacaagagttaaaatatccagcataaaggtgcatacctcgaactgggcacagttgttcaaacactgtatagataatcatttgaaaaaatatccagttctcactgctatcagctactgtactttatgtaaaaaggtaaataaaaacaacagctgtttccatagaaactccagtgttattattggaatccccatataatgactggatgtttccttggcatatctattcaaatgtatttagagaattccttttgagtagctgctgtgaactaggcattagttttatattaacctacagttgaagcacagcaatctttgaatcagatgttatcttttggggagtatgtgagtaatttctatatgttttgtttttttaaatcagtcttccattgcgtgtaatgtaaatatttttcaaaagaacaaaaatttttccaaatttgcaagatttcaaattcttcctcaaggtcaaccatggaaactttatttttttccttccctgactccctaatgcaaaatatttctcagataagagcaaagggaagccctctaatagcactgaaactttatgtgacttcaaaagaatatgcattcagaggaaacactgagaacaaagattctaagtcctgacatgcatggaatgcttggagaatggctgacatctactgggagtaacagaaggtaagaccataactgtactgtaatgaagtctattagccttgaatggcaaagtaaaagaagattcctttatcttgcaaagcagaaaataactaaccaatgactgtatctcaataggcacaccatgtgattgtatctccttaccaaaaaggtatctggcaaagcagtgatgaaggaatgaccctgaatcagaaacatgaggtagttgctctaaaactgcccagtctgtagggaaatggacatcgaagcagaaaaataggagtcctaagatggtacatcgcttacacatgtgatgtctggatgtagagattaagagagaaactgtagaaaatagcttgagttttctggattgtttgtcaggacaagcagaacagcagtgggagcatatctgcctgtgcggtgatgaaagccttccatgacaaaatccaatttctctacacattgcaattctaatataagtgttctgcacttaaaagttcttagcaaaatttaacctttaaaatatcctgtttgaaaagtcaaacagctgctgcaacctgaagagtggatctctggatttgtaattttgtaagaacaaattttaaaaacaaaagcattacaaaaatcaaatattgggaaagtaaaataaattaataatagaaagaatttgcagtactatatttgtcttaattaaaaattcatttgcaaggatctggggagacaacttggtcagtaatgtaaggatctgagtttgatccccagaacttatataaaaacaaaggaaaataaacaacaacaaaaagacagttatggtgatgtatgcttagagaaagttggaaaactggggttcgctggcaagtcagcctagcttacttagtgaattccagaccagtgagagatcctcttttcaaaaaggtagatgaatggggctgaagaagtggctcagcagttaagagcacatgattttcttgcagagaacacagggctagttctgagagcatatgtgattgttatctgtaactctgttccagggtctcttgacatcctttttctacatacaggcatatggtgcaggcaagcagtgatacacacacaaaataataatagaaaataacaaaaaaataacttcaaagtgtgtaatgcctgaggtataaaacccaaggtagtctgtcctcaggtttccatgttcttgtgcttacatgtacatgtcactttcacacacatgtacacttgttacgataaatctttccaccacccgcttgagttccattcgctgctttagggcctcagataatacatagagacttctattaggtacaaatgctgcctggccaatgactagaatttctcatctgttagctcagtcttaattatcataaatttatatattttataagacttatcatatttaagatgccttccattggcatcttcatcccgggatcatatggtgactcggaggagagaacaggaggaagagaggggaaagggcccatttcctgcatgtccttgcttaaatatgagtcttcttgctgtgtcatttcctgcctggataaccacttatttattatatttcccacaatcctccttgactcttagtcccatctaacttgctgcctcattggccaaacaatactttatttattatccaataagacaaacatatacacagaagcacttcccccatcatacactcacaaaggacttcaaagcaaagtatgtggttaagtggtaaaatgcttgcctagcatatacaaggtccttagttcaatctccagtccataaaataattctcaacataaaatagtgtatctacaatatttttatatcatgatactaatatatatattttcgtatccaaagatgtggatgtctccgatttcactgaaaacattaagtagattattccagctatgacacacatgaatatttaacaccaatggattttgatgctgaaagtgctgttataaaagacacaaatgcttcttaaccttccctagcactctagcttgctttgcttcagaagttttcacctcacttccaattacttaaaactcaagtaggacattgctcacattcccatatgaattgtctgaaaacaaaataacaatccctataaacctgggcaattagtattctttaacagttcattcttcagacaattgatctgtatcagtcttctgaaaaaaaaaatggctataggacttcttcaaagacatgggatgcatgtgtatgaggggtatgaggagggtgggggtgttcatgtacatgtgtgcttatgtttgtctatatgtgtgtttgtgtctgtgtatatgtacatatatgtacatgtatgtatgtatgtgtatatgcataatcatgtttctgtttgtatgtatatacttgtgcatgcattttttcatatatgtgtgtatgtgagcattcataagtgtatgtgtttataaatatgcatatatatatatatatatatatatgtgtgtgtgtgtgtgtgtgtgtgtgtgtgtgtgtgtgtgtgccttcgtgtcattccctcattagttcacagctgctttccaaacatcttcaaatggatttccccatgctttacaagagttggttacaaaatccagaagtgtaagttctgtgcttgttcagtgtcaatatatttttctacattagccaattggcttttcttccccttccttataccttatctttctgctaaatatgaaaggctgtattcactaaatcccaggatccttctagcagcatctttgcacctacaggcatctttacatttgcatgttgtatcagctttgcattccactttttataattgggagcaacagcaatcaaacttgctacagtcatatgccgtgatgggaggatgcaagtttagtttcagtattaaccatgtcaagttatggcaatggacatagaatgaggaactcttcaaagagtaatgttctctggacaccagaaattaatgtattgtcagtagatgctgtgttatcatgagtaaacacagacagttgctaagggccagcagtcctcacactcctagacacatgtaagcaggtggatgactataaactgcttcacagaatctgttgtattatttattcatatgtgcttctgccatttatgatatgaaaatattttgaataatgatcagattttaatattctgtaggaaatttcaaacaaacacacacactataatatatatatatatatatatatatatatatataaacaccaaagcacacacttatgaatttaaactttgttttaactaacatcattagaaatgttccctgttatatttattattcatggccacttcaataaggccatctatgtggagatttaattccattgaagtcttaggtattattcatcttcactttattccagaaatatctgctaagaacctatgagaatgagttagtaaaaatcctagtctaagagctatgaaagaaatagttaagttgatgggtgtggggctaaaaagccaagtaccccatatggaatagggtctagcaagcaggaatgtgggcaaggagagtggatatagaagagaaagtaaaagtataaaattggcaaggatggagaatatattactaataagacacatttccttgcaaattttgtagtttgagcagactataaataatgtgtgatcacagaaattctcagaaagtgaacctatagcttctaagcaaaagtgttgtggcagaaaataaggctaaatttcaagccaaataattcagttgtgccacaaggattagtatgaccttggaaggatacacagtcaggacttttctacgtccttagatacatactgacaaacttaaaagatgactcaaactcttcctagcataaatattttatgatgtcactctcttgagcccttctatgttaaataagagttctcaaggtaggaatcagaggactccttgagacttgaggaaagtctcaatgcagaaatgccctctacaaaacagaataaatgtattgtgggattcacaaggtcctgaaaacccacctacactaattgctaaaacgtcctgcttccatctgccatgaagaaaagtgaagcagacactctcaggggtaggcatgatggtggagagaatcttcctagaagacaatgtttattataaagtctacatgtcacagacattggtcctcctttctgattacccatgtccatgtgctatcagttcttgcatcctggtatttcttcactattcttttagttattgcatgtgcagtcctgtgagaacagtccccatgttagttgtgtttaacatgtatttctgattttacttttgaaaagtactttacttttagtgtacagataaaacatgggctaaaaccagtttttaatttttatctgatatatgacagtaaactccgaagtcctcatcacaaccatctaccctcatgacacagtaatgaattagtgagacacatatacgttgataggaaaatgggccttctccaaaaataggctaatcatccttaataactttaataaggttagttgagatgattaatttgatttttaccttatctaccagttttacattttcagtgtgtagcaaaacagcattaattcatgatcctggcacatgtgtgcttggttgatgctgtttgctccatgctgtcagttggtagattgttgtatatgtgtaagttaaagcaggctattaagagtagtatttgctgagggactgagaccttcaagaatggaaagaagagggcatcaggcaagaaacacatgaaaagatcacattttatgttttgcacatttaaatgaaatgcaagaaagcatgatagataaaatattttgtggtttcaaagcattacaggtatgttcaggaaaaggtacaaaatttacttctcagttaattggctaaattatcaaaatctaaaaaaaaatgtcaatgggaagttcaaatctgaaaatgtagaaaacatatgtgtattgctaccagcgaatgtagtgtgtccagagttgtcaaaataaggactgttaaaaggttcctccgctttcctgatgcaccttaattcctctgtacctaagctaatgggattaataacaactcttatgtttataaaaatcatatgctaaattaaccaaaacataaatcttaaagtgctcaacacttattctacaagtgttaccaaatgaagcagctagtgttgtgaagtgcattatcaatctgtttatgtattatctcggggaagaataaaaagtagatgcactggaaatttattatttgtcttttgcttatagtattgatagaaagagattatatggtcagtcataattattgagaaagattgaataaaggggcctttagcccattagacaaaaatgttaaaagatcaagagtgaggtaacccagtcacaagaagacaaacatggtatgtacttactcatatatggatattagacatagagcacagtatcctaaaatccacactgccagaaaagctagggaacaaggaggaccctaagagagacataaatgttgccccggagattgggacaaggacaagatctcctcaataaattgggggcactgagagactggagagggagttaggagaaagagaatgggagaagaagatgggggaggaggacataagggagcagtaagattgagttgggagaataatagatgagagcaagataagagataacacaattgaaggagtcattataggctcaaagagaaatccagtactagggaaatgtccagagatccacaaggatgatcccaagtaagaatctaatcaatagtggagaagctgccttcaatgcccttctactataatgagattgatgactaccttatatgccattctagagcctttgtccagtagctgatggaagcagaagcagacacagctaagcactgagctgacctcctggaatccagttgcatagagggaggagagatgagcaaaggggtcaaaaccaggctggggaaactcacagaaacaactgacctgaacaaggggggctcatggaccccagactggcatctgggagaccagcataagactgaaccataccccctgaatgttgctatcagttaggaggcctgtgcagtctatgggggctctttagtagaacagtgtttatctctagtgtactaatggactttgggagcccactccccatagtgggatactctctcagcctagacacacagaggagggcctaggccctgccccaaatgatgtgacagactttgatgatcctccatggaatgcctcaccctccctggggagcagaaaggggatgagatgagaagtcagtgggagccatggaaggatgggagggagaggaagctgagattgatatgtacaatcagattgtttctagtttaaattaaaaaaaaagttccttaagagtgtatattacctcatgataagcaacaaagagaggctactctttctgtgccaagaaaagggccacagatggggtagttattcaaattcagttgtaaaacaggacatggctgcttcgtgggagtgctgcagtgtgtggtaagggagatgaactacaacaaagtgccagggaagtataggggaagtataactgaacttcaacttccccacctttaaaaccctgcaagtacttgctattggccataggcaatggaacactaaaaggcaagtgaaccttatcttgttttctccaaacatattccccagcacaaaatcctatggagaagggaagaaggtcaggtacaaaataggggcaccactgtcaagaacacaagaaaattaatgatgtactcagagaccatttagaaggtctgattctatttcagaatagagacagaacgattgtggtgagaaaacaggacatgtgttagagattagcaagaaaaatgtgtcccagtcctcatctctccctacagtaaaacacaggactattatctagtaaagcatgaaataaaattttattattcatatagctaatttgttatttagagtacattgtttggacaaagttttctatgtaaagatacatcatcctaacctagaaatttattcctattaacacttttaatacttctggatgggcggtctactttccaggttttattactttgagggcccatgttaaaagaaagttattggtgatgaggctgattcacaagaagaccccacggagaaacacaaggtaagtacggagttgactcaaatctctgacagctaacatcagcttgtctctactagatcagaaaaacagtccatccaaactctaacttagatttattatgatttgtcttctctgctacatatagggtgtccactgtgcacagagttgtttttacctcatctaggcaggaatacaaaaacacctaaaacactaaagatattttgaaaatagcattctaccctgactcttcccctctcattttagaaacactttaaagaatactctgaagactccccccatggaaggcctcaccctccctgaggagcagaaatggtatgggataggtagggtgttattgagccacaggggaggaggggagggagagggaactgggattgacatgtaaaacaatcttgtttctaatttaaataaaaatggagaaaaaataatcttccatcttatttattctcaacaaatatatttctatatatttgtatttataatacaaattatatttgaattataaaatattcacttaaattttcacttttattgtcatattttcttgttttcattcatgttcattctttcaaattgactctttagcagtgtaatggcggcacatgactttaatcccagtacttagtgggcagaggcagtcagatctctgtgagttcaaaaccagcatggtctacaagagctagttccaggacagcctccaaagccacagagaaaccctgtctcaaaaaccagaacaaacgaacaaaacaaaacaaaataaattgactctttatatgtcgttctgagcactctcattggatttatggcacaagtatctatgcatacaagattttcactttctctacttcttaggttgtagaaacttaaatttgcgtttccttattcaaaattggattacacaaatatgagtatgttaacctaaatgtaatcagatgtttttgtatgctaaaatacctacaggtagtagttttattatactcatttgtaaattaagtctatataattttgtttttaaatttgcaatatctgatccaagaacttatttatagttttaaaattcattgtgaagcataaaagttttattttatgtaagttttataaactcatgcttatttggtcggaagttgaaattgagaaaagtaacaataataaatttattgtgcattagcatttatcttttcattagtctaaaattgtattgtttttgttttttatgtgtatggatggttgacctctgcttatgtttgtggaacacatgtgcacagtggctacagaggccagaagaaagcatgagatccatgaggaactggaatcacaggtggttgtgagctgctgggaattgaacctgggtcctctagaaaagtagccagtgctcttaattgctgagtcatctgtctaggccccttatatgaccctaaaagcagcagcttttctagaataatcaattttttgttttgcttacccttgtttctttcatacattacatgccaatagcaatatcccctccatcccctcctccctgctttctccacctcctctctctcctagatccactcctctgctttatcccttaagaaaagaaagaaaaggaaagaaaaaagaaaagagcatgtctcttgagataaccactgaacaaagtgaaacaaactaaaatatgactagacacaaaccctcatacaaatctaaacaagacaacccagtaggagaaaagtggtcccaagagcaggcaagagagttagaaacacacccaactcccacttttgggagtcccacaagaacaagctgcactatcctaaggtatagtcagaggacctagctcagacccgtacagtttccctgtgagcactatgtcagtctctgggatcccctaggaaccctgcttagttaattctgtgacccttattctcccagtgaccacttctctggctcctacaatcctgccctcccctctccaggtttctctggctccttctagcatttggctaggggtctctgaatgtgcttccatcagttgctggatgacctccctctgatggcaatttggttaggcgctgatttatggatattgaagactatctttaggatttaattcatttactactactgctgctgctgctactactactactactactactattactactattattattaccagttgtatttggttctatcctgggtctctgggctatcctgcctctgcttccttgaaatcgaggcagtatcatgcatgggctctctcttgtggcatgagtctcaagttggaccagtcattggttggccacccccacaagttctgtaccaccattaccccagcacatcttgcaggcaagacatattgaaggttgaggttttgtggctggattgatgtcccagtcccactgctaggaggcttacctaattatagaaaatgggcagtttggactccatgtctcctaatattaggagacttcactagggtcactcttataggtttctacattatgctccaaatgctctcaaattccagtcttctctcccactgctctctccctccttttctccactccctacatgatctctcctgttcctatccacatctatccccagtccacctcctaaatcaattcaatttccttagagggagatccatgaatctcttcttgatcactcctcattacttaaccattctgggtctgtggattgcagcatgattgtactttatttaacagctaatgtatactttaaagtgaataagtaccatttttcaggttctgggttacttcactcagaatgatcttttctagtttcatccatttgcctaaaaatttcatgatttcatgacaatagctgagtgtaaatgcaccattgtgtaaatgcaccacattttctttatctgttcttctgttgaggggcatttaggtgtttccagtttctggctattatgaataaagcaataatgaacataactgaacaagtgtcattgtggtaagatggagcatgttttggtatataccagagagtagtatagctagatactgagagtagtatagctagatactgaggtagatcaactcacaattttctgagggactgccatattgatttccatagtggctgtaaaaggtttcactctcaccagcaatggaagagtgtttcccttgctctacatcctcttcaacataagctgtcatttgtgtttttttactttagccattctgataggtgtaagatggaatttcagagtcctttagatttgcctttccttgctagccaattgaaatgaacatttaagtgtttcttgttcatttgagattcctggttgggaattttctattttgatctgtatcccgtttttaaattgtattgcttgttttcttttatgtctacttgcttgagttatttatgtattttggatggtagcactctgtcagatatagagttggtgaaaaaaatttccacactgtagggttcctctttgacctattgatggtgtatttttcttacaaaagcttttcagtttcttgaggtcccatttattgattgttatccttagtgcctgtgctattggtgttctgttcaggaagttgtttcccgtggcaatgcattcaaggctatttcccacattgtcttctattagattcagtgtatccagttttgggttgaggtctttgatccactttggacttgagttttgtgcaaggagatcgatattgataaatttgcattcctctaaatgctgattttcagttagacaaataccatttgttgaagatgttttcttttttctattgtgtatttttggcttctttatcaaaaataaggtggcagtaggtatatgtattgatatctgggtcttcctttcattgatcaacctgtctgtttttatggaaatacaatgcagtttttattactagagttccatagtacacctaaaataagagatggcaatgtctcaggatgttcttttattgtgcaagagtgttttaggtatcctgctattgtttcttttgtttttccatgtgaagttgagcattatcctttccaggtctttaaagactggtgatggattttgatggagattccatgcatctataaattccttttggtaggatggccatttaaatatcttaaccctatcaatccatgagcatgggagatcttttcatcttctgatatcttctttagcttctttctccaaagacttgaaggctttatcatgcaaatctttcacttgtttcattacagttaccccaatatatttatattatccatggctattgtgacaccattgtttccctgttttctcttagctagtttgtcatttgcatttagaagggctactcttttttttgtgaaacttggtgtatccatcagtttcaatgaaggtgtttttcagctgtagaaatcccctagtagaattttgggggttgcttatgtatagtatcatgtcatctgcaactgacaataatttgatatttcaatttctatctccttgatctccttcagttgtcttattgattcatctagaacttcaagtactatatggaatagacataaagagagaagacaaccttgtcttggacctaagtttagtgggatttctttgagtttcacctcattcaatttgatgttgactgtaaactttctgaaaattgcctcattatgtttagatatgtcccttgtattcctaatgtttctaagagttttatgatgacagcatgttggattttattaaggatttttaagcatctattgagatgatcatgtggtttttgtctttcaaattgttttaatggtggattacattgacagaattttttatgttgaagcatccctacattttaaggatgaaacctacttgatcatggtagatgctctttttctattttctttcttttattttatttttatttatttatttttgttttttggtttttagagtcagggtttctctgtgtacccttgaagcctatcctggaactagctctgtagactaggctagcctcaaactcacagagatctacctgcttttgcctcccaattgctgggattaaaggcatgtgacaccaatgccaggcttatgttggatgatcttgatgtgttcttgcattcagtttacaagtatttgagtatttttgtatccatgttcatgaggaaaattggtctgtaggtctcttttttttgttgttgaatctttgtatggtttaaggtatcaaggtgattgtggccttataaaaatgaatttggcaatgttctgtttctgttttttggaataaattgaggagtatttgtgttagctcttctttgaaattccgatggaattctgtgctataaccatcaggcctcgggctccttttggttgggagacttaatcactacttctatttccttagggcttatagtctatttaaattgcttatgtaatcttgatttaactttggcatgtgatctatatggataaaattatgcattacttttagatcttcccattgtgtgtagtaaaagtttttaaagcatgacctaatgatccttaggatttcctcattgtctgttgttatgtccccctattcatatgtgattgtgttgatttgcatagtctctttccatcttttattttgtttggataaatgatttttttgttgttgattttctcaaataagcaactttttgtctcattgattcttcttagtattctctttgtttggattttgttgatttcagctctaagtttgattatttccttctgtctacttgtggatagacttccccctttttttttttctacagctttcagatatgttgttacccagcatgtctcagccttagtccatgaggttctacctgagtgggggtgtgtggacctggaagctccgagcaacccaacgtcgataaagaccaaacataggcatcttgtcatctttagagagctctcagttctatgttgtggaactagagtcatttctttattagccatcttttctggtgtttcttaaccatcctgctaataccattaggcaaccatttctctctttgttccctcgatgctctggccgctcgcctctaaactcataactttctgtcctcacaagttattcacacacctctagctcctccgcccaagtgagggcctattcagatgcttagccacatacagatgcaaataagagacatattaccttgagactatggtaaacagtagtagccttactggcattaacaatacaataatgggccggagttttccagtgctccatgtttagtgaaaccaaaggcaggatctcaaactattccatagcggaaagattttggtcccctacacagatatgctatttagttactagtatgagattccctccaacttcttaaagtaggtacttactgctatgaacttcccccttagccaaatttcttgtgtcccatgtgtttggatatgttgtacattaattttcattgaattccaggaagtctttaattgctttatttttctttgcctatgtccaggtgtcatttagtagatagttattcaattgccatgattttgtattttttctgttactgaaattcagctttaacccactgtggtctgatagaatgaaggagtttatttaaatatttttatatctgttgagacttgcattgtcaccaaatacggtcaatttagagaatattccatgaggtgctaagaagaaggtgtattgttttgtgtttgggtgacatgttctgtagatatctattaggttcatttggttcataacattttttagctccagtatttctctgtttagtttttgtctggatgacctgttctttggtgaaatgtggtgtattgacgtctcgcttcatcactttgtgagggtcaatgtatgatttaagctttagcagtgtttcatttacaaatatggtgtttttatgtttgtggcatagatattaagaattaaaataccatttttagtggatcattcccttgatgagtatgaagtatcatttccttcctctttgattaattttagtttgaaaattaattatattgtgttagatattagaatggctaaaatctttccaaccctttactctgaggtaagatctatcttttatgttgagggtgtttcttgtatgcagcagaaggatggatcctgtttcatatttgctttgttaatatgtctatttttatttttgaattgagtccattgatatggagagatgtgaatgaacaatgaattttaatcactgttattttgttattgttgttgctagtatgtgtgcatgtgtgagagagagagagtgtgtgtgaaagaaagagagaaagagaaggagcatgcgtgtatgaatgtgtacttcctgtctttcagttttgatggagtaagattatttatttcctgtgttttcatgggttgttaaccccttggagttggattcttccttctagtaccttctgaagggctcaatttatagacagatagatagatagatagatagatagatagatagatagagatacaaatttggctttatcatggaatatcttattttccccatctatagtgactgaagattttgctggctgtactagtttgggatagcatctgtggtcactcaaagtctgcaagacatcggtctgattctttagagtcaccattgagaagacatgtacaattctaataggtctgccttatatgttacttggccttttcccctccagcttttaatattttgttgttgttgttgctgttgttgttctgcatgtttagtgtgttgattattttgttgtgaggggctttatttgctggtccaatctatttggtgttctgtttgcttcttgtacatttacaggcatgtccttctttaggttagaaattttttttcttatatgatttttgtttaaagtattttctggaacctgagtatgatacccatacctttaattcaagaactcatgaagcacaaccaggaggatccctgagtttgaggccaacctgatccaaaaagtgagttccaggatagccaaggctacatagagagatcttgtgttgcagaatattattcaatcacactgtaaaccccaagtttgtgtttgcattaattaagtaaaattaacattgggtcaagaggcagagccaacaactagttgacagcaaataatcatagagagagagagtcttgaagatgaatggagagactcacaggaagtagtaggaaggaagtttgagtgtggtagtcctttttggtttggtgagacgccagcaaagaaggaaggtcagctagtggctcctcaacctctctgagctagccagttttcacccagcctcttactcagaagtgttactgataaatgatagaacaataaagatttagttaaaaactacatttggtagtgaccacaaaggagccacaataattggctgaaactgtagtatatttggatgtacgcactgtgccaatgggaaagcaacaacccttccttgaaaaacaaaacaaaacaaaacattggggtgggggctttgagctgggattgttcttctattcctaatattcttaggtatggtcttttcatagtgtcccagatttcctagattttgtattaagaattatttagatttaacattttctttgaccaatgtattcatttgtcctatcacatcttcaatacctgaggcactttcttccatctcttgtattctgttggtaatgcttgtgcatgcagatcctgtgtactcacctagattgtccatttctaggattccttcactttgtgttttctttggtgcttctatttcccttttgggatcttggaaagttttattcttttccttcagatgtttttttccttggctctctttagggaatttattcatttcttccaatttttgtatgattttttcctacatttctttaaggtgtttactcatttcttctttaaggacctctatcatcatcataaagttggcttttagggggctttcttctgcttcagctgtgttttaatattcagggcttactgtagtagaatggctgggctctggtgatgatatactgtgttagctcttgttcttacactggctttttaggaatctgtgtttgggtatttataggtctagatgccaacttctgagtttgtctttgttgggtgggtgtattttcccttggtttctgcttcatttctggtctctggtggttgagttggggaatgaagctctgggggctggcatggactgggtccagcaaggtgcctctgatagagttgagagctagaatatgtgagatgaggagtgaagggtcatttggggatagactgtgtaagcactgacaaagtgaggacattaagcgagcagccagcctatctggggttctggtggctaatgtggcctctgttggagcaggagtttcccctggagttgtaaccaggatacgatgatggggagggtagggatttgtggtaggctgggtggacactgagagatgttagtgagctgtggttggggtcttaaatttactggtgttctggattccatcatggcctctggtaaagcagacagcttccacaggagttgtcagactttttccatcggaaccattgtctcctcagtaatgacatagagactcattattaattatgaaagcaaggcctacatcttaggctagttcctaactagttcttataatttaatttaaccaatttctatcaatctatgtgctaccatgtggctagtgtctgttacctctgctcctgcttgtcttgcttgttctctgtccttggtgagtctgccttcttcttcccagaaatcactctatccccagaagtcccacctatcctcttttcctgcctagatattggccattcagcttttattaaaacattcatagtgacatatctttacaccttgtaataaaataacttgtaacaggctgagatatttgtatactgtatttttttgtgtgtaaaagaattgtcatccggcataagaaatgatctcattaatgctttatttttgccaatctctagagtgtcaaattttgtagaaaacaactggattctcctctctgcctctacattcaaactaatacgagaggctggtttgagtaaagtatatgaagaaaatctagcctcatagacatactttgataattcacaaaagcctgacaagtgagattaaagacagatgctgtgatggttagttgctgtgtatattgtggaatctgaaactgcattcaggactttttcataccttttagtgagtttatctttttttatttttttaattatttaggaattttagattttaaaataagtacattatttctcccttcctttcctcttctatatactgtcccttgctctctttcaaatctatggcttctcttttcattaactgccacaaggatgtatgtatatgtctcatcccttaacctagaatctattgacaattgatacttgatgaaagagaagaaagcttcactccaggaatgcccgatgctcaggagtaatcagccaacacaaattggaatcgtgtttttaagttatttatttatttatttaaattagaaacaagcttgttttacatgtcaatctcagttccctttccctcccctcctcccctgcctcccaccaacccctatcctatcccctttctgatccccagggagggtgaggccttctactggggaaccctcaaagtctatcatatcatttggagcagagcctaggccctccctcctgtccaggctgagagagcatccctctatgtggaatgggctcccatagtctattcatatactaaggatacatactgatccactaccaaaggcccatagattacccaggcctcctaactgacacccatgttcaaggggtcttggttgatcctatgctggtttcccagctatctctctggggtccatgagctcccacttgtttaggttggctgtttctatgggtttctccagcctggtcttaacccctttgctcatcactcttccctctctgaaattgtattccaggagttcagctcccacagcttctgcttccatcagctactggatgaaggctccaggatggcatgtaaagtagtcatcagtctcatcatagtggaagggcaattaaggtagcctctccactattgcttagattcttagttggggttggccttgtggatctctggacatttccctagtgctagatttctctttaaacctataatggctctctctattacggtatttctttttttgctcttctttgcatcttcaacaaatgatgctgacataactagacactggcatgtagaagaccttgtttttgtgattttattttattaaagaaaggaaaaatgaaataggtgcgtatggtggtcaaagaaaatctaggagttggggaatggaaagaatgtcatcaaactatattgcttgactttgtcaaaaattgagatcatttttagaagaagaaagagagttcagcttttccatgtgggattgtgcagatgtctacacagtgacaaagaaaggaaaaggaaaaggaatagcttataatgcccatggaagatagcctagtcttctggagtatctaaaagctcttcagatttcttgaaattcataaaccaaattgtgagagttgctgtttaatgagaccagttctcacttacacacattcacatatgcagcaattaattcaaccatggtattttcttttaatattatgacacattatgtaagttcgcacaaacataatactgtaccaaataaggattcacaattatcatctctcatcttaaaaatatttggaaaaagcatgaagtaataatagctgtgttatgggcattagaaagaaactaaaaacaagcattaaattggaaattatgtgatttctgagtgattgtaaacaggatttttctttattttatttatttgcctcatgggaaaatccaaaatcaaatgtgcattttccaaaagacagaaaataactgagagatttgcaagagtttttggtgtgtcaatctatataataccactctttactcaaaaaactaatagttttaatttgtttaccagaatgtctatcatactaaattaagctaaaggaggctttcttaaactctaggattacttatatggtaatgtctaatgtgtcaagaactcaggcatcattgttgcagtttctgctgcaatgatgagcacttaagcagcctgattggtgctctgtcactctgctctcttactgcaggtttcctcagttttcctttgttgtgtcatctagagctctttcttctaataacaatgtggtaagctgtcttttatcactgaagtatgaccctctcttcaaccttaaaattacttattgaatctgcattttatctctcgttttctctcttccatttcttcttctcactccctctccacttaatttctttaaaacatatgtctgtgtgtttaatatatatgtatttatatattcattcaataatttagttaagactcttctgggtcaacttaaagagttatttctgttataaaaatcataatactacaatattataataataataatgaaaggtgggactctgtgtctgtatctgagtctcatttcccatgcatctgggagttgctattttccttctgctcatttgttttatccttacaatgtgggttttttaatgttattttattattataccttaactggttctcagtctgtgtggcacaattcctttaaggggtcacatattagatatcctgcatatcagaaatttacattatgattcaaaacaacagaaaaataattttatggttgggtgtccacacaacaagaagaaatgtattaaagggtcgcagcattacaaatgttgagaaccactgcctaagaaagttgttttttctagtgagagagagagagaagaaagtggagctaaatggaagggtatgtgaggaggagctgtgagaagtacaagcaaagaaaactgtaataagtatatgttgtttgaaagaaaaatgtattttcaatacaaggaaaaataatataataattatatcataaaaatcattacctagtaaatcctcatggtacataaaaagtaaatcaatacgtttttcttctttaatacttcactcttatctccttgttcataatctatattatttactgagtacaatttctattataattttaatattattagttttttatctcaatgactatctatgcaattctatacatacatagataaacacacaattctattagaatttagagaaattcagtacttattacattagtcctcacttgtgaatgccttttactgtttttgtggcaatttttccaaagtgagttttagtatgtttcctaatgaaaatgacattattattcattgagattctgtctcctatttccattttacatcagcattactattaggataatgtttttatttgtttgacttcttattcatccttcaaagctaaataagtatccatatattcttttggcatttaatgttaaaaagaaatttgaaggcccaactgaaagttttttgtttcttgttttgttttttaaataatttcattttaatcttgaattcataaagtactctacattaacatttgaaattctgccagcatataccatttcttcactctctgccctcctcctggaaacactttagagtggtcctgtgacataacttgaaggaggtgagttctgattcctgcccagtaattctgcagttgcaacagaaatccccacagctttgtgcacattcagaaaggaaatgctgactctgtttcatctccgatgttggtgaatgttgggacccaaagatcttggggcttgacatgagatcctaggccattcttagatggccacatagttgtatattaacctttacatagcagctccttagacctttggctcaagaaaagaaacaacttgacccagtcctcctcccacaggctcagttacctaggcaacccttcctggacctcttactcatgaactctttaccctgccaaacatcctctttatggcttcctaatatcctgcctacacaaataactggtgcacaaacaacccattctaccattccccatatcctgccctactgactatataagctagactgagaaaaataaagtttgccacttgagcagaatcctgtcttgtggttgctctttctgtgtctcttgtcctgattccctatccctgactctcttgccccaggttgatgtcctgcaggtcgggacaggtgaagtcgccaacagaagcagataccttgaaaatgtatatttttgtgtttaatatgactacataaaattttaaacatttagcctcttttctccttctacagaacaaatctgtttcagccacaatcacaagaaatagagaagctttactttcctgtgcattcccaggaaacagggtgtttcctttgcactggatcctcattctgaagcctctgaatggcaaggtcatggaggacttggtgaatatgatcgtctccgagtctgaggtcagaggttatgaaagaagcatagcaacaagacctgtgagtgtgtgataggccctcctgggacagtgatgtaaaaccatgtctatgacctgacaatacaaactgtttggggtatctttacttcaaaacctgcgtaaatacctattcctttgttgcatgaaactaagatccttacatgagtctgtcaagttaaaattatgagtatctgtcaatagtggcacaggatctcatgaaagagtaacttaattagagcctatgtttccatgttgtcccacatgctagggctgaaaggggtatcagaagggaggctctcttgcaggcatgatttttaataactaaatttatttttctctctttttatattattttcttcattattagccaaggtttaagacactcgtattgtttataacaataccaagctctttgcacaaaatgaaaatgtcccgtcgttattagctgatgatcattcttcacacctcacatcccaaaacttctgtatacaagctctacttaagttttaaaaaaaagtgtagccagattttcaacataaagagaaaattcaatgctgtcttgctgagagaaccagatcccagaagctaacacagtcagatatttactgtcttactttggcagtcatatgcaaacgatgtctagaattcatcagcagttttaataccacagagagacctgttatcttttatcactatgataatattgcatataaaatatgtagaaatgtttatggatggaaaagcttgcaaagaaagggaagggagagggagaaagtgacaccaagtgtcaaaaccctaattcaaacagtaaaaccagacaacttccccaaaggctgtcttgggtcttctcagattttggtgagcatgaatggaagacaaaagaagaagcagtatatgaagctacatgagaacttagtctaagcatggtaatgttccaaccatgaaatggattttaaaacaaactaaaatgttgatcctagtcataacattgaaaatacagtgccgtaatgtccccttcaaatattgctgttcaaaatagtgcaattcagaaattatccaatctgaaccatgagagatttgagaataaattacatgctgatgattttagagatgtgttttgataatctgttcttgcataataaattattcccaaatataaatagtaaaagaaatgactaccttatctgctcagttgccacttgtgtttcctccatgtggggagtgtgagcatccttataatagggtaatgatagattagtcagactctttacatagaagcaaagttcctttggggcataaaagtaagcatactcaggccttctcaattcttttgagacatactattggttataaacacattatggagccagaccaaaaccaaggacagaaaggctgtgaaaaagcatggatattaaaggtgcagggcattttagagaggagctaggtagtaactaatcatggacagatattatgcatgggcagatatcattacctttctaagtaaagctacctataatatgtatttctctgggagatactattttacaatactctaaatgaccaacctaaaatttatcctagaataaatagtacaaattttctatagacagcaaatgtttaggatcaaaatattaaaatatcagtaatttaatgaaatttttaaatgacattcctacttctttcagaagggttcaagtgtaaagaagaagtgtaaagataattctatgcaatgtattttatactgtaaataatagtgactggaggcagttctttctaatcatgtgaaaatatctcctatctacatttatttctttttctgtgtgtatctttaaatgacactattattacagttggttgttacgaatgtgttctcagacagaattgacagagtactttttaagccaagactgaagcagcctaaacacagaatttgtcagaatcttacgaggaaaaaatgaaatttttaactaagtgtaaccagtaaatcagatatgaaggttaatagcatagagagaagactgaaggccagatgtatttgaaaatcaatagtctgaagggaatttgtaaagaaatctaaactattttttaaagaatctaagtcaaatgtaaattcaccaaattatttgggaaacagatttggttttttgttttctgtatccgaggttaatcagatttgaatgattaagacatacaatgattttgaacagccattataaacatttttaatttgaatataagttttacatttatgacagaatcctgtacctgcttggtgtagcagatattcttccaatttgagttttaatgataaatgagatcctcactaaccaacaagagtatttcttccaaaatgtcatattgactctaataaaaaaagctcattgtgttagcatttcatggaacagatttaaaagatacatttttactgaatccgcagcaggatattatgtgaaattaccaaggagagctcacatcataaaggcacaatttataggccatgataagaaatgagcagcacaccatacacagacaatccaatgtccatgaagattgcatagcacctcgaagaaagggagggggatgagaacccttgaacaaaatggaaacatggggagtaggtggagaggaaggaggtaggaaaggaagaaggtgaggagaacaagaggcctgagagaggggaggaatagaggagggcaagaaaggataaaacttgatagagggagacaatacaggtgtagagagaggtctggcacaggggaaatgttagaggatccacagggatgaccccaactaagaatccaagcagtggtggagaaaatgccattgatgtccttcccatataatgagattggtgtctaccttggttatcattcctagagccttcatccagtagctgtttgaagcagaaacaggcacccagagctgaacactgaaccataggcctggaattgaattgtggagagcgaggagagatgaacgaagaaacagaaacatttgcagaaacccgcagaaacagttgacctgacctagtgagagcatggagaccctagccataaagctggggaaacagcattggaccgaaccaagccctctgaatgtgggtgccagctagaaggccaagacagtctatgggacctctaacagtggaaccagtctttaaccctagagcacaaatgggcattggaagctcattccctaaggagggatactattgcagcccagatacagcaaaaagggcctaagccatccccaaaacgatatgacagactatgaaggtcccttgtggagggcctcactattcctggggaggagtttgggaatgggggggttggtggggaacatggtaggatgggagggcgagggaatgggggacatagatatgtaaatatgagatatgaatagtaattaaagaaaaaaatacaactctcaatctagccgggcaacggtggcacacgcctttaatcaggaggcagtggcagtaaaatctctgtgagttcgaagccagcctggtctatggagcgagttccaggacagtctccaaagcaacccagagaaaccctgtctcaaaataccaaaaaaaaaaaaaaagaaagaaagaaagaaagaaagaaagaaagaaagaaagaaagaaagaaagaaaaaagaaaaaaaaagaaacctctcaatctatggttgaaaatagcaatcagggcactagagtgacggctccacgattaaaaatacattgtatgctttcagaagacctgaatcactttccagcacatatatggggcagtgcaactccagatccagggcaatctggtgccgccttctgacctccacaggatgcacatgcccacagagagacacaagctcatatacatgatttctattaaaaaaaaaaaacttacaaaaagaaaataggatgcacttacttgagcgacactatgcaataaagtacattagagcctacaaatagtgactgaaatcagacctttgatctaagtctcctcgggcataggttataaaaccaaagcattcccaaagtgcatatgtcggatgaggtatcccaggtctcggtcagtactagaggagactaaaattgggaaggatacaagttgagaactcagggatctaggaaaggaagttcctcaacttatagagagacacatgaacagatggaataaagatcattgtttactgataagtcttgatgacactgctgatatttgtaagggaaagtctcaaccacggaatagaataacaaatatttaagatcttctataatccaatttcttttagagaattcaacaaaggtttgggcttcagatctcatcaccattttttccacagatgtagacataaactatttgtaaggataaattaaaacatggtcaattttaaattgcaagggttctacaaacatatttgaagcatttttctaagttctatgatttcttcaattgtgatgataatacatttaccttgagaataccctttgtacaaagacttctgacaagtctcagaactcaaaacagaaaaaaaaattatggataagttaacaagtttcattttttactaacttcctgatatatatatatatatatatatatatatatatatatgtgtgtgtgtgtgtgtgtgtgtgtgtgtgtgtgtgtgtattttttctgtattctgtttctaagtttcactagactatgttcctttattatctactgactgatttgtcaaacaaaaaaaagacaagttttatattaatttgtgtaacatggaacttgagtattatatctaacttattaaatatatatatatatatatatatatatatatatgttttctgaatttgcctacaaatgttgacatcaaagcaatgcccttgattatttcttgatattcccataaaatataaactaaattcctcttttctgagtttttgaagcttggagctaaaactgttaatagtttgttatttttaagtgaaaattttaattcctgtgtatttgttaggtatttcacttaatatttcccttttctctattgtagtagaaaatcaaataggtcaatttctccagatatatgattgtattcaatgaggcagcctttatgcaaaccttacaaagctgtgaaggtccaacatggattgttattgcttgctataaaatataccacagggcagccattgcaaattttcatcatatttactttaaatttacatgcatatatatggatcatattgaatcttagcccacttcttatgattaccacataataatttaaataacaatttgaatcgcataatgtttgtgagtcaaagaaataagctatgtatctgatcagcctcaaaaagcaatatttacctattttactcatttacttccttctgttttcaaaattataatactttcaaatttattttgcatttattttatctcgttatagatgctattgttatttcttcagtatttatgattatgcttaagtaaaattctccttcttaaaattgtaggcagactctccactaatgccatggcaaaagtatcacttcataatgagccaagcattataacctctgcttgttagtaatcatatagaagaatgaacttcttaatatgagttagatttcctcctcatgttcctgtctgtagtactacaagctcagatctgatctactaatctaaccaaaatatatgcaagtgggagcagctacagcttttcatatatgttttgctacattattttgaactaaaagtaatctttcaaaaatgcattttagtatcccagatgggaaagtagaaatggaaaataggaaagatatttcacttggttttggaaggaaagcacatcaattaacagattttaaattattggcctgctttcacaaattaatgtattttgaggcagtatgtgtatgcagaaaggaagttttatagtatctgttactattcctttaagaactgtaacttcagtggaaaaagtaatgagtttaaagaattagaaagacatcaggagcattctaacaattagaagaatctgttaattagcacaaaatatgaattttaagctgccttgctcatcaaatcatttattttaatgaagcaatgttgatcagaaatcttactaacaaaaataattacaagagaaaattaaataagcaaaagcattctgaagaattgtggtccaaaactacaaaatggaggttcatggaaaacggggattaccaagtcatttaccctcttcctcttaggagttttctcagaaagaattagttggaatttttctttctaaagattaaggaattgtgtatgcctatcacactgaaaaatgcaaatggcaccttagacttgtcattttaagattagataagataggagtgacttggggcttacttaaaaagagattgtaatgcaggcttcaggatagtcatgctggatccaaaataaaagatcctttcttgtggtctggcttccatggtaccaaaaaatactatacaagcttccaaaggagagaagcaattactatctatacatagaagtgacccctatgaattacaacaataaccactatggcaagaaatatataaaagtgacttaagtggcactcatatattggtggtaacccacagctgtttaaatagacttaacaccaatttaaataagattaggatttgtagaatgaaacatatctcaacagggaaatcatgcctgataaaagaaacctagctgacactgaggactactgaggtcatcagtcttacaaaagaatcctctatggctactttgctagaccagtataattcctaacagaattcttttattgaaaagaattttatttcctcatataataaggtttcccctcctgctatacctccttgtatctcccctctataaaactccctttctgagtctcattagaaaacaaagaggcttctaaggtataataataaaataaaatgaaagaaaatagaaaagctaacacatattaattggacaaaacaaacagaaggaaaagagtccaggaaaggcacaagaaacagatatagctgcagatacccctcattcacatccaggaatcccattaaaaaattaaactagaagacataataaatacacaaagaacctagatgagaaaaatacatatgcattaatgaaataaaataaaaattacaacaaatatttttaaaagctctaacatgacattatgagactaagaaacctctaaagatgcctttgagttcattttctcttggccatctatgctaggcacacagcctacacttaagagtattttgtttccccagtgagattccattgtaaacaactaaatttttatttgctagtggttatcaagttggaaaaagcatatgctggagtcccatgataaccctgtgtgtgatatctcagtctctgtgatattaatatgtacatcatcctgttgatgtatatggtcttgcatccgtagtgttctccattccatctagctccctctctttctgtccccatcctctgcagggttctctgaaccatgagggaaggaatttgatggagacatcctatgttctgaggtctctcattctctgtatatattggctagtggtgtgtctctgtatttgtccttatctgctacaggaggaaacttcctgatggtggctgagcaaggcagtgatctatgaatacaccagaaggagtagatatattgctacattcttttaggagagcagtagtatttgatttaccctaggtccttgggatatctagtcttagattcttgatcaccaagcaatgtcaggtatgggttccatcttgtagagtaagccttaaatcaaaactgatattagtgttattcacacaagttttgtgacatcattacactaacatactggcaggcagggcagtattgttgatcaaagggtttgtggctgagttggctttacatttcaccttgcatagcatctagaataccttcctgtaacaaagacactagagtgtagtgtgaagactccatgtaggaaccaactcaaattccccatgttcaatgagttgcataagtgttttcttcagcagtaggatcttgcaattagtttgtgttgagcaacctacccatcttgggaacagcatgacttgtttgaaggttcctaggaaacccctttagccaaataatccattagacatatgtcattcataccctacactgaaaacttcatttggtgacaagagatgttaggttgggactcaggctcccctattatttggcactttcatttaaattatgttcatatatgtaaatattttaggaagcttctgctgtactaggttttcttactactgctcaaatggtcattaatgttaactatctctccctgtatttcttatcttatcccccctctaccttccatctcctgacttgatacttctgttccagtttaacccataatacataactatctattctatttcactttcctaggaaacgctttcattttccccctagggacatactctatacaaaacctctgaagacatatggatcgacactttcttatcttttagtttgtttttgaaacacacgcagttgtcattgatttaacagctaatgtatacttataagtgagaagatactatgtttttctggggctgagctacctctggataaccttttctagttctatccatttgcctgaaaattttatgatgtcattgtttttaactagtaaagattactctattgtgtaaatgtaccagattttctttatccattcttcttttgagggacatgtaggttgtattcaattcctggctattgtgaataaaacatggataagtgaacacagataaatacgtgtctcttggtagaatgaagtgtcttttggttatataggcaagaattatatagctggatttcaaggtagatggattcccatatccctgaggaactgccactctgatttctacagttacaatgcaagattacagttccaccagcatcagatgcctgttcccctactccccatcctattgagcctgagcagttatttgttttaacaatcttgatcattatcagggatatatgataaaatataaatgtagttttcatatgtatctccatgatgacttaagattttcaccatttctttaagggtttcttacccatttgactttcctctcttgagaattctctatttataccacttgttttcgtgataccagttttgaaaacatatattttggattttagccctctaatggatatacactttttaaattttttttgtcattctataggcatctacttttaccaaatgatggtgccctttgttttgaagaagcttttcagtttcatgaggtcccatttattaattctagatctctcagtgcctgagctaatctgttcataaaggctttctctgtgccaatgagtccaagggtattccgggctttctcttctgtcagattcaatgcatctggtttatgatttggtctttgatccatttgatattgagtttttcacaagatgattaagtatggatttatttggattcttttttgggggtgtttttttgtttgtttgtttgtttgtttttccgaaatagggtttgcctgtggctttggaggctgtcctggaactagctcttgtagaccagactagtcttgaactcacagtgatccacctgcctctgcctcccgagtgctgggattaaaggcgtgcaccaccaccgcccggctttacttggattcttttacatgcagatatacagtttaataagcaccgtttgttgaagatgctgtcttttcttccattgtatattctggtgtacacatacacacacacacacacacacacacacacacacacatatctcaggagtccaaggtgggtgggtttatgtctcagtcttcaatttgactcaatcaaatcatctggttttgtgtgtgtgtgtgtgtgtgtgtgtgtgtgtgtgtgtgtgtgtgtgtgtgtcatagcattctgcttttattactatagctgtgttgtaccacttgaaattagggagggtgatatctctagcagttcttttatcattcatgattgttattacattcctcggttttttgtgtttacataaggggctgaaaattgtcttttcaatatttataaggagttgtgttggaattttggtaaggatttcattgaatctgtagattgcctttggtaagatggccattttactatattaatcctactgatgtgtgaacatgaagatctttccatattctgataatttctttcttcaatgtcttttattttggcactatcttttttcctccatttatatttaaattagaaacaagattgttttatatgtaagtcctagttccctctccctcctttcctgccccccactaaaatcctaattatcccataccatttctgctccccagggagagtgaggtcgtccatgggggggggtcctcagagtctgtcatatcctttgggatagggcctaggccctcctccgtgtgtctaggctgagggagtatccctctatgtgaaataagatcctaaaatccattcctatgctagggataagtactgatctactacaagaggccccatatatttatgaggcctcctcagtgacacccacatttatggggtctggatcaggtccatactggtttccagtggtcagtctggggaccaagagcttcctcttgttcatgtcagctgtttctgtgggtttcatcagcgtggtctcgaccactttgctcatcactccttctctgtaactggattcgagttcaattcagtttttagctgtgggtgtctacttctacttccatcagctgctggatgaaggctctaggattgtatataagttagtcatcaatcttgttatcaggggagggcatttaaggtagcctctccactgttgcttagatggttatttgttatcatccttgtagatgtctgcacatttccctagtgcctgatttctctttaaacctatactggctccctctctgattatatctcttattttgctctcctctattcttccccctatacaaccttcctgctcctttatgtcctcctcacttctcctcttctccatttctcattctcctcactccctctcccctcccccatatgttcccaatttgctcaggagatcttgtccctttccccttctctgagggaccatgaatgtcttgcttagagtcttctttgttgcctaaattctctagtggtgtggattgtaggctgggaatattttgctctatgtataaaatccatatatgagtgagtgcataccatgtttgtctttttgtgactgtgttacctcactcagaatggtttcatctagttccatccatttgcctataaatttcaagattccattgttttttttcttcctccattgtgtaaatgtaccacattttctctatccattcttcagttgaggggcatctaggttgcttccaggttctggctattacaaataatgctgctatgaacatagttgaacagatatcttttttgtatgaatgtgcatcttttgagtatatgtctaagagtgggattgctggatcttgtggtaaactgattcccattttcctgaggaattgccatactgatttccaaggtggctgtacaagtttgcactcccaccagcagtgggaccaccaggagtgttccccttcctccacatcctctccagcataaactgtcattggtgtttttgattttagtcattctgacaggagcaagatggtttctcagagttgtttttatttgcgttttcctgatggctaagggtgatgaacactttcttatgtgcctttcacccattttagattcctctgttgagaattctctatttagttctgtattccactttttaattggattatttggtgttttggaaactagcttattgagttctttgtaaaattcggagatcagctctctgttggatatgtggttggttaatatcttttcccattctgtgggctgctgttttgatttgctgactgtgtactttgccttacagaagcttctcagtttcaggaggtcccatttattaattgtcaatttcagtgtctgtgctacaggtgtaatgttcaggaagttgtcttctgtaccaattcgtttgaggttacttcccactttctcttctaagaggttcagtgtggatggatttatgttaaggtcgttgatccattttgacttaagttttgtgcatggcaatagacatagatctatccgaaatcttctacatgccagctccagttatgccagcaccatttgttgaatatgttctccttattccattgtttatctttagcttcaatgtttttatcatacaagtctttcacttacttggttagaattaacctgtagatattttatattatttgaggcgattacaaaaagtattttctccctgatttcttttcagtctgtttattattcctgtgttgagtagggatatttttcagatttattcttttctttgaatgagttatccatttcttcttcatttagcttacctgctttcctccctgactgcattctatatcatacctttattcagacggataactctgcctacctcagctcatcaaagaagcttctttttacagcaaacagagaccatcacagaaaaccacaactgaatacaatgcaggaatgaagtgatgattgggacccaaggcccagtgtatgcatctgtatcacagttcctgtctctgtaactcaggaaacctcaatgaacaggagacagaaagattataagagcaataataaggtaaaatagctgtgaatcagtatctcctagacatgagtgcataaaaatgatctgaacaatgataatatcaacagacaggttatcatagaagggagataatctcatgaagccgtgtccctggaaaagggactacaggaaagtaacagctgataatagaatgagatcttttcctaaggatgaatctcctaattgcttctctaatagaaggttgtcagttccaaagtcacatacacacaaacaacaacaaatatgcagcagtttgtactcatgcatgcatttgtataaataaacaggagatagattgacagatactagagaagaagagtgtcttagatttttctattgctgtgaatagagtctatgaccatggcgactcttataaggaaatcatttatttagggtggctggcttacagttttagaggttcagtcaattatcatcatagcagggagcatggcagtgtgcagaaagacatggtgctgccggtatcttgaacagaagacaataggaggcagactcagtatcacagtgagtgaaactgaagtaaatgagatctcaaagcccacccccacattgatgcttcctccaacaagcccacacctaattcaacaaagccacatctagtggtgccactccctttgggacccattttctttcaaaccaccacaaaaagtatttcagctttagagtgaagaaggtctaaggaaggagttggatgggcactttggaagaactggagggaagaaagggaaagcagaaattgttataattgctgcgtgttggtggtgcatgcctttaatcccagcactggggaggcagaggcaggcggatctctgtgagttcgaagccagcctggtctccagagcaagtaccaggataacctccaaagctacacagagaaaccgtgtcttgaaaaaccaaaaaaaaagaaattgttataattataatttaatattacatctataaaaaattaaaagagattatgagaattcactgacataatattataaagaaattcaaactttctaccaacaatcatttagagattactgatctacatgtattttaagaaattaaataggaaagaattaaaggcatgttgcttcatgcagtggaggcacagaagatatcaaagacaatgggcaatgagcaagaggccaagggatgcatcatacttgaacttatgtagtctcactatcttctgggaagtcaattaatatgactactgtaatatttctgtaagtcctgaatgccactttgccaatttgttatcaactcttctcttaggttcccatggtatacatttaattttaagtgatattttcttgcttatctacacaataacatttaactactttattacaatgaactatctatgaagcgttataatcttctaagttgagaagaatgttacatgaatctgtgttctacaaatgagaatgatattaggtgtccaaaactttaaaaaaaatatatttcaacaaaatatattttcttatgaaaaacctttcacatggagaaaatgcttatataatactggtatacttatgacagtactagtacagtcttaatgctaggatagtactaaaataattttttcatttattttgtaactttcataatgaaagaagaggcacaaagtaagaatgcagccttcagagagaaacgagaagagaggacaaagaaagtactccttggttgacacctgagacaaaacacgttatgattctgagcaccaatattaaccttcctgtcatcaacagttcagaggttgttgctggattttcctctttttcgtctgtttttaccaagtcaagttgttcttaactactagtaatgtttagtaatacaactataaattaagacaagctcaaatggtaatgttaaaaatcactgctaattgtgaagcatttgctgtttcaagatccagaagtgttgggtttaataacactatgagacattgatcattgccaataactttttaattgagtgagctaagtctaaaatatgacaaagggattaagaaatatcagtcacattaaataccgaatgacttcaaaatttcaagaaaatccttcaggattcatttttatttatatcaaagaatattacttcaaataaaaaagaatgtttagaatcagaacaagtcaaactgtagtttggaaagttaagaaagcaaagtgattatttgtgtgataacagagaagttttgatttatatggatcaccagatggcttttcaattctaggaatcattgctattttacctagaggttcactcactcttgttccttgggtattgaacatggactatttaatattattaagtataacatttccacaagcaaatatttttgaagtcaaggtaaatttagtgctataatatactccattcatattctatgcaaaaataaaatagcagaacttatctcatgaggcctactaacttgtagagaaaaccataacaaagaaagcaactaggtagtatattggcgaggctttgcagggataacacacacagttacagaattaggatgaacctgtgagatgataaatggggatacaggagactgatttcactgagatgatgagtggactaacattttcactagaaatctgtcattcccatttaaaggttttgttatctacatgaagctgtgttctgtcccaaacttaattgtagaacattccaagttcaaaatgtactaaattggccattttagtcatgtttttcttaaaagcattgtgtattaaggctgtaacagcctataaagaatcaaagagattacaaaaataatcttggaagtttaaaaaggagggtaggtagatagaaaaaaatcatatttgacaaacattttattatcttagtaactaaatagtttcatgtcttctgtcttctctccatgacacatttcagtctgaaatagattaaataagtgataaaaatccatgctgggccttgctttagtctgcatgctactgagcaatcatcaaagttacccagtaatttcagggatagatctattattatctgccaatgattaggtcaaatcagtcaggttgtaatccttattagtgatgacaagggttcctgtgctactggcccttaataacttataacatagcaatgctgtggatatttaatcaatttatgatctttccctttgaggcaagccacctttttctgcagaatgaatgacctgctctgctcagcacagcccctttagaaagccccctgcctagcagcctatgtaggttttaaatagaagacagatttttttctgataacatctcatcatcacctggcctagaagattcacatagaacagttcagaaataaaactatggaaacattgctagcctgcgattctggatataagtgttgcatttcatctcccagatgacctacctcttcttagaactcaaatatacaaaaagactcacagatcaccttgccaaatgctagcaatgtttgtgaacaaaagaagagaggggaggccaaactctaaatgcatgtcaacggtacccaacctatctaccacctcttagctgaggccttcacttttattgtggtctccattttcatatccctcagaaacccattatctcatcattatttatcatatcaaacacccccttttaattttaacttcaatagattcccttttcattttttcgggtggagtaggtgattactgctccccttccatctacttttatacagatatttacagcctctgggagaagaggaaattgtttacacgtataattgcagctaaaaatcagactgctaatttagagtaaactgtttgatccagaacattgttagaaatttaattacttgtcaaaaaaaagtaaaaatgttttttttttagtgctgggtctgttaagcaagcaaggcctgtcaatgagacatgcagtgctgaaaaaatatgccacaagaatcttaattgatagttgcaccagtaaagaatatgtgtattgattgaaataaatttcacagtggctgatgtctttccaggcaacaacaacgttatagaatcaattgttaatttatgaagagaaggaagatttgcttcacttaatgaaaggttagttttcactttgtaagatatacagttttatgaaaaatataatattccttacatataaaagctggatatgtacataatgtatttctagcttgctagattacaactttctagtcaagacatgaaaacaatgtaatagctatacagctatttacggtaatcaaatgcttagtcgatggcttgtaaacttgatctgcaagtatgagaagaaacctggtcctacaaatatcatcaaaagcctatgacatggcccaaggaggctatcacactcctcttgcttctctaaatggatatgttgttaaaattccttctaaacatttatgtttatccttataaactaaattctctctcagcctagggcagagaaattcctttatacagaggactacaatcccaagactcatatctagtcataatggtgagaatacgtgactgttaaacattcaatcatatcctggacatctttaccacactcctctccaaaaccgagggaatattacagaggaggtcagctaaaagattgtcatagtcagataacaaagacaacaactaacacagctgttgcaatcatgactgcacagcttaaacaggtatctgtgcaagagtgtagcctttattattcagtaataaacagacaaggtgcagacaagaacccaccactccctaaagggctgtcgttttcattagtagtcattggggaattagtggaaagcagacaggggttcagaggtgaaggaaggaagttagcatagagtcataatgaaggagtgaacataatcatagtacatacagtatatgtgtgtgtgtgtatgtagaaattaaaaagaataacaaataaatctataaaaagaaaaatctaccaaattgagaaaataaatcagcatttaaatgagcaaaggatctgtatagaaacagaaatttctccaaagaagaattactaattaatagatagaattagtacatttttaaaagatatttaacataaataggcatcagggaagtccatattattatttctcactaaataagctatctgtgacctgaaagaaggacagtatgagatatgaaggacacaaagagactacatacaccacacccaacaagtaggaaggtaaaaagttatagaaaatttaacagatagtttgacagtttcttaaaatgagaaaacaattctcaattccattccttggaaaacactcaagagtcctatgtatgaaagatattgtacacaaatgtacacattagcattattcataatatggaaaaatagaaatatctaaatgttaccaatatttgaataacaaaaatatgagctacttgcacaatggagatctcaagagtattaagaactgaaatgctgaaacatattccaataaagatgaacctagaaatattatgctactgaaaagtactgtcacaaaagacctaacattacgtgactcagcttatattcaaagtgtataataaaaacgtttttaaagagataaagcatatcaatgtctttgctgggcttgtggaagaagggcaagtgtggctgttgagtcaatgctaagagttgtattttcccccttgtggggagttgaaaatttccttgattgtcatgaagattgcacatgtacctaaacattgaatcacatactttgaatgcgattattacatagctgggggattataactccaagcaagctattaaaagtaagataaatgtcaggtggtgaggcatatggttgtgaaaatcttgccacaaagaattgcaacgggcatgtgtatgtgtgtaaggttgcagaaggatggcaggaaacaaatctcattttctgtgttatgtttagttttaacttcaaacttgccacagcctagaatcttctgagaggagatgctcagatggtagaggggtgttatcgagatcaggttggcctggggccatatatatgggggataatcttcattgttaattgttataggatggcttgcactattgtagatggtatcactttctgggcaaggagggcatcatgtgctgtttgtgacaggagaaagacaaatgagacaaaatggtaacataggttcatttgtttctctttgctcttcactgtggataagatgggactaaataactgaatttaagccttaacttcctcttaatagtgggctactctaacctgaaatcataagccaaattaatcctttatttcttaaattgcttttggtgatggtatattatcacaatggaaattaattaagacagtattagatttcagcctgctactttcttgtatataagatgcacgagagtgtgtatatatttgatatatttatgtgtatttacagatatgtatatgtaaaatatttgatgaaaaaagtgttcaagattttaattttctttcgatatatactaagaaggttcaaaataaaaattgagattaaataaaaattagatttttgattttttccatattgtttataaatgtgtttctgtcttcctttccaacaaacatcaaattctagtagaaaatatttattaattttgtctttggtacatatttatgtatcaggtagccaaagctgataatcatcatgaacttagtgttatgctgtcactcatatgcccatcaactccttgaaaggaaacagcatggtagaaagcaagaaatactagatagaggggcataaatgctcaactgatagcttaggcttgttactatctagatcttaaattaatcctttttaatttttttgagacagggattctctgtggagccttggctgtcctgggactcactctggagacctgtatggcctcaaactcactgagatctacctgcctctgtctcccaagtgctgaaattaaaggtgtgtgccaccaccacgcagccatatttttatctataatctatcatgtaactcagcacatttcttcaacacaacctgttcatgtttttctcctgatgactttttacaaccctgcccttcttcccagcattctctttgtccccaaaatcctgtctacctgttggccatttagctctttattaaaccaacgagaacaacacgtattcaaagtgtacaaaagatcatttcacaatgagagagacacagagagaatcagtttaacctggttttctcttcagtttctgactattttttggaaacattgctttttcatactatgtatagaaggcttttagcaggttatggaattccacaaacttcatgtacaggcattttttaaatcagcaaatagaacagattgaagataaccatgtgtcctcagactgacctgagggtcagggtttatgcttgaatgtactgggtggaaatacaagctgcatttatgacatgacttgccatgaaaatctcagaatcccttgtgttgtacattataccaatgacttttaagccttagatcttcaaagatgttatataaattaaataattcagaaggtttggctaacatccagtttataggcctgaaggtttcccaatgtaaataaaagtttggaaaattatctacaaggaattcattacactagtcatcagatatcatttcagaagtcatgttagagtcattatgacaactagaacaagaatatactttatgtttaatgttagcatgagaatccttttttaaaaagctattagattgacaatatcgtagagaacaaaatacccactgtttgtagaaggatgggggggggggtcgggatgagagcatgtggcagagtatgacacatgtgtacaggtgcctacagaggccagaagagggagttagacttctggagctgaagttacagttagttatcagccacccaaagtggtgctgaaagccaacctgtgtcctgtgaatgatcattatacactataaaccactgaaccatctgcttatcacgcattttatttttaaagggctcttctgtttatttattttatttttaatcttgaatatggagaggtatttacctgctctcagcatccagaggcattggctcctcttgggactggagttacaagcaatgtaagttttggatgcaggtgctgagaatcaaatgcaagttctcagccaggctcttaactgctgaaccaaaaccttagcccctaggtgcatggttggacttgtaattgcacctcattgttacagggctaagctgaggacaaaagaggaaaccattataacaggtgtcctcttatctatgtccgccaaataaaatagaaattcttaaggtgttgagactttgaggaaacttttgcttacttacactatctgagccaagcaccagacactgggtagacagtatgcttcacatgctttggatggaagtgacgcccctattgtaactatttttctgaaagaccacctccacctctgattgtaaaagaattatgtaggccaagagaaagaaattgtccccaattttgcctgtttcttgaacaatcataaatgttttagtgtttttcaacttgtaaacgcttattgcttagccagaatattgcttcagtgactaacaattgtccaaatttaaaatgtttttactatggttgatgtggaatcatgaaaagtcttcaagactgaagtcaagaatctacacaatgtttgcatgtttcagctaggaattttatgcatatcttatttaacctacttgcctaaaactccttataattataattattatcctgacttagagacaataatgaaaagtttcatgatagtaaactgctaattcaatcgtcaaacttttgttttgttttgttttttattaacaagtgccccatttccagggttcctctgtgtgacagaacctctgaactaaggaagagataaacatataggatcacattataagacccagctcagggatattttgctgtttttagatgggctgcataaccacactgagagggactgatccataaataggaggcatttaggcactggagtgacattttgttcattatttcatttcatgtcatttgccacatgtttgtctctaatcccgtgcatgttcctgtacctatgtaatattcagtgtgaaattctatgtcagtatatttaaacttcgaaaagtcagtaggttcagagttgtgattcccatagcaaccataataccacccctttgtttttatatagcatttgtataactggagaagttgttaagttttatatcttaatataaatatgcagtcatgttgagtgtctttttatagttgctgtaggaaccacaatttagaattttctgattttctttgcatttaaattcccaatcagattattgcaatcaccagcatttctctaattttattgaagaagtggaaatgggggaaaggagtagtaattttattataaattcctggagcttttattttaagatgctccttaactgccaaggggaatttaaaaaaaaaaagaaggaaagaaatagcgtattttaaaaataagctggtgacaggaaggagcactatggtaaataaatgtaaagtatttttaagtctgtgaaattgccaaatatttgggaatatgatattctcttgtggtcacagagtagtgaggattaaatagagactggggaggttcttggctgtcttttcagacaccaatatatgtgatgcatgtgaagagtgacacgagaggatgcagggatgtgttttatatcagatggcaggcattgcacccaaatgaagagtttaatagaactaatctcaacacatacaatttttacacaagaagattcaatataagttttgtgcaacaatgacgtgaatgtgtgttaaactcaagaaatgttctaaagtaatatttcatttacttgtgtgtatgtatcaatgcatatgtttacataggtgtgtgagtgtgtgtgtgtgtgtgtgtgtgtgtgtgtgtgtgtgtgtgtgtgtgtgtgcacaacagtgcatgtacagaagccaaagaaggtatgtgatcccttggaactggagctacagacctttgggggacaataggtggtttactttcctttctgttgctataataaacaacataaccaaaatcaccttgagaggaaagagtctatttagtttatttggccaatcatcccagtccatcttcgggggaggtcagagcaggaacagaaacaggaccctgggggaagaaactgaagcagatttcaaggaggaacaatttactctcttgttccccaaggctcaactcaaccttctttcttatacaacccaggaccacctgcctagggtgctgttgctctcagtggactgacccttcagtattaaccatccatgaagaaaatgactaactcacaaacatatccacaggacaatccaatggtgcaatttctcaattgaggttcccttttcacaggtgactaatttgtgtcatggtgacaaaaacttaccaatgtactagatgtgttaaataggttatggaatctgaagtgtgatacttatggaataatcagcaagagttcttaacctatgagctatctgtccaacacccaagaattgcttttaaatgattgagaggttataagaattcagtcaaagagaacagaggtcctgactaaagagaagtgccttaactcaagatctggtacacagaccaaggaagcaattgaactcaacccatagcatcccctctcctcagaaactgtaatggattttcaattatgtatttcattgtttactccaacactaatgcctcacaaaccatagtttaaatatcttcaatgtagacacacaccttcaattgtattctagccaagctatgtacacacaagtgtactttttaaaagttttctacatagaacttctgaagccacaaggaatttattatgcacaatgttgtgttaaggaagaaagagaggtactctggccatttttattatgctaatcctgcatacatgagcattgaagatctttctatcttctgatatctttttaaatttctttcttcaaagacttgaagtttttctcatacaagtctttcacttgcttggttagagttagcccaagatattttatattatttgtggccattgtgaagggtgctattttccttatttacttctcagctcatgtgtcatttgtatataggagagctactgattccttcttaattaatcttgtacctatctacttcactgaaggtgttctctgtgggtgttccctggtagaatttctgaggttacaaatagaatacaaatagatccatatccatcacactgcacaaaactcaagtccagtggaatcaaagagctcaaaacaaaaccaaatataaaacctgataggagtagccttgaaggctttggcacaggagacaattttctgaacagaacaccaatagtcctgacactaagatcaataaataataaatagaacctcatgaaattcaaaagcttctgcaagggaaaggacaccatcaataggacaaaatgacagcattcagaatgggagaagattttcacaaaccacacatatgttatatgggctaatatacaaaatatataaagaactcaagaaactagacatcaaaaaatccaattaaaaattgggtacagatataaatagagaattctcaaaagatgaatttcaaatggctgagaaacacttaaagaaatggtcaacatccttaggtatcagggaaatgcaaatcaaaatgactattttacacatgacagaatggctaacataaaaaaaaaaaaaccacaagtgacagcccatgctgggaatgatgtagagcaaggggaagactcttccattactgccaatagtgttaatttatacaaccactatggaaatcaatatggaagtaccttagaaagttgggaattgatctacctcaagactcagttataccactcttggccatatacccaaaggaagctccaacctaccacaaggacaattgctcatctacattcatagcagccttattcataatagtcaggaactgcaaagaacctacatgtccctcaactgactgatagataaaaattatggtatctttacacaatgaagtattattactcagctgtttaaaaaatgacatcatgaaattcccaagaaaatggatgaactagaaaaaaatcatcctgtgtgaggtaatcatgactgagaaaggcaaacatggtatttactcacttataagtgaatattatctgttaaataaaaaataagcatgctacaatcccagacccagagagggaaggtagcaaggaggacccaagggatactgcatggatttccctgggaagggggaaataaaatagtttttgcatttaaactggaggtgggtgatgatgagaacaggaggaattagtcaggggagagggatggaaggagagaatacaactggaactggggacaacctacagagtgatgtgaaaacctagtgcagttgaaactccctggaatctatgagcttaacactaagagaggactcccaataatgtggaatatagagcctgaactggtcatcttctctgaccagacaatgttccagtagagggcctgggacctcaacactaccacaaaaccttcaatctacattttgtcctgcattcaagatgtgctgaagtaatggtggcacagaatttgcgggagtggccaactgataactggtcaaatttgaagtcatgccaggagaagaaattcactcctgacactgcctgaatggccaggaagcagaggctggatatcctagagaccaagatcagaaccaaacatgactgacaagaaaaaaaatgtcaataaaatgattcccaatgatagtctgatatactcatagtatatgcccagatcattgattggtgcccagatcaatcatcatcagagagactcatccagcaactgatgggaacaaacattaggcaaatctcagtgaaccctgcagaagagaaggaggaaggatggcagaagcagaggggtcatcaaggataccatgagaccacagtccactgaatcaactaggaagagctcatagaggctcatggaaactgaatgacaagcatgggcctgcaggggtctgagctaggtcctatgcatggtgttcttatgtgactcctaacagtgcaagaatgtggggaagggaaggggggtctctgattcttttgcctgctcttggaaccttttcttacacttgggttgctttgttcagccttgataagagagttttttgtaatattattgtaacttgttatgccatgtttggttgacattcctgggaagctgcccttttctgaagaggaaaggagaaagaggatctgggggagagaggttggggaggggcgttaggaagaatggaaggaagagaaactagacactgtggtagggatataatgtataagagaagtataaataaaaatggaaaaagaaaagcctagaaacctagacaatatattaaagaaaaccaatatcactattttttaaaaaaggaagaaagggagtgaggaggggaggaaggagggtggaacagagacagggtggggagtttggaggatattgttctttcacagtttataaaatacattttaattgcaaagtcatggtatttcactgtaaatactataaaatacttcctcataaaggtgaaatgacaattaatacatcagttaatgtattagttgatgaaggcaaggttgattcctcaggttcaaactacattttgtttcttctatggtgatttagaattgaatggctctgatgatggatgacttattcaaataattcatagaagactaaatacaaatgctaacaggtgtattaatttttgtataagtatgatatccaagaaatattcatagtgtgtactttataattagcattttcctcatgtaagtgaatcttcttgggaatttcattttaatcacaaagactgtaacagcaagtcagaggattttttgaatgattgcataatgtcttctccattgaaattacctagttttagataacctaaaatttaagttattgaacaacaacaaaaagctacttttagtcctaagactcaagtacccaaaatagacctagttggtctgtccccttctctgatactcatcatagtctcaaaactcacacagctattgtcactgggctctcttgctaaatccagaaacaactgtctggtgctggagaaatatcaagtagaagcccaagtatgctaatttgtggagttcaaaaccagcctcacaaaaaaatggcagcacaggcatgtgcatggaaaatgaccagttactccagaccacactacatctgtgagaaacattcatcatcactaggtagaaggaactgtgtccatacctctattctggacacactgacaaacccaaatgcaatgaagactgcaaggggtgtctactttgtggatctgagcagatttcatacattaaccttgtagaaacactgtccagctatcacaaataagtcaaattgccaccagggatccagtagcaaactctttaatattctgcttgaagaaactagagtttctaaagggtactattaattacaaaatgtcttctagatctattaaatgggctgtgattccctaaggtttagcaaaatacaatatcttcaaatgcccatttgatcagtggatatacacatcagtcataacaagtaaattaagcttgtttttcttaatgttaacactgggaatgagatacaggttgccattattcataataatttattaatttttaaaaatatttaatacatgtaaatgaacatagagtgtacattattttgttttgttttgtttttcaagacaggttttctctgtggctttgaggctgtcctggaactagctcttgtagaccaggctggtctcgaactcacagagatccacctgcctctgcctcccgagtgctgggattaaaggtgtgcgccaccaatgccccgctcagaatatacattcttatataaatgtttgtgacagatttcctttaatatcccctctgcacttgccttttcctatcaataaaatgtgcttctctgcttgcttgcactgtaataattacctgctatgtattttaagatttagtatcacaagaataagattgtctgccttttttactccaattgtagtctttacttagaactgaattcagtgctaataaattttaaaatgtgttttccattgaggatttgcagcaaaatggttgtcacaggttggtatcataagcatctgacttcttgtctgacaacctacaatgaatgttcagctacatgagagcatgctgggtatgacttgattctgactgttatttgttgtgttcagaggcacgatgaccatctctcttgtctcctttctaacagccagtggcctgctggataaacacaagcatggcaagcatgtcagcatttcagaggggaaataataaatacattttttaattttctcatactttagcacccagggatacagagaagacctacctaaaatcggacagtatcattaatgtgatcacaggttttgatacaggtaaaattactgattcccaaaagtaaagacactgttgtaaagaaaacaaggctccatagaggcatggtgtccactcagacgacttcaggaaaggacaatttcatactttatatgaggactgttgctctgagccaggacaccttatttccctcaaagcctgtgtgtcagaaagggtgccactggagtgcagtgtagctgagggctactttagtttataatttaaactgctctgttgttatattgcttcatattccttctttggctgcaatttcagctgattgatagacaaagaaggaatactttgattcaaggaagttccttaataaaataaggcaaaatctcccatcaataaatgacctactgaagtaataatatctacatgggcagatggaatcccctgctgctattgcctaccttatcgtcatttttttttattattcatctggtttttatttcttcttcacctctaaatctcagacaaggaataaaattacaatccaaacttttttatagttaagtgcatactttccacagcattggggctaccatcaactatagtttattaataaactaacttgttctctttttattattcttatttaaattaaaaaacaatcttattttaaataccaatcccaatttcccatccctccagctctcccactcccccacaatctccctatcctacccctcatccactcctcagagaggatgaggcctcccatcatagggagggtcatcaaagtctgtcacatcatttggggtaggacctaggccctccctcctgaatctaggctgagagagtatctctccatagggaataagctccaaaaagccagttcatgcactagagataaatactggttccactgcaagaggctccatagactgcccaagccctccaactgacacccacgttcagggggcctggtttggtcttatgctggttccccagctctcattctggagtccatgagctcccacatgttcaggtcagctgtttctgtgggtttccctagcatggtcttgacccatttgctcatcactcctccttctctacaactggactaggagtttggttcagtgagtagctgtgaatcagagactcccttgtttttcttgtggttttaaagtaatatatatttttttgtgttatgaggcatggaaaggcaaaaatgtaaagaaaagtataattaataaacccacaacctagagataagcattattagtatatcattggtgatttttagggtatactcatttaggtaccttccatacaaattggtggaaacaatattatctttttctaatcctttttaaaattaaattttatttaaattacaatcttattttagacaccaatcccagttttctctccctcctatcttcccattcctcccactatcccacccattcactcctcagggagtttctaacactttcagttggtgaactctagagagttttgtgtgttatttcaatatgaagatgtgtccatcttatagtacttcccaaatttcctcttctttattcctctgtggaactttctccctttctctgttcagagtcccaacagttctcacagttcccattgactggagagacaaggtgaaggaagcatcgatgagtgtaaaggagggaggagtgggagtggcctcagaaagaatacatgttgcctgggacatctgttagtcaatatattgtggtttgactctcacaccatcagttgcttttgactcaggaactcagcagcaacctttgcaagaaacactatcctagacagattgctgacatgatgctctgccttttgacactgaaagcaggaatgagattccacaccaaacccttgcttatatgctacagagtggactgcatagctggtcattaaataaaaggttctcataagaagaacaatttctataattgtctgtgtatttcctatatcccgggtacttactttatcttttatcaatcatatcttctatatttggaaaaatgaaaaacaaacaaacataccaaatcaccaatatgagattacttgtcaaagttcactgatcaataattattgattagcttgtcatgattttctccacaaactatgttcttatgtatgcacagagtgaattattttaacctggagtataaaatgtcagtcatcctcactgcctgctcagcttcacagtgtaattattcaataaagcaaggcttcattgttacaataaaactgttttttactggatagccttatgatacaaggaaagatttatatccttatagtagtttactttccttttagatagccaataccaactacctacccagcatttctgaaagaatggcatattgccagaataccattgcatcattagaatttagttaagcaatcaactactcagagaattattatgggttccctccacagctcttttccaaatgaaacagatgcccagaagaatgtgatacttcctgttgtctgggtataaccagagcaaacacacacatatttgcacattggaagtgtccactgtgtttcattttattctctaatataagatggttaaatggttatctcttatttatctctatgtccaaagaacctggtagtagatgtgaaatgattatcagatgaagaaatcaatgataaaatcaaatgattcaagaaaggaaaagtatcatcacttcacaatttttggtttccctgaattgtggacgactgcactgcaaagagtcacaaatacaagacatcacttcccctctcaaacattgaaaaacagaatgaaactgaggttaaatactttggttatgcaatattgctgggtcaagattttctttccacattttactatctgaaaaattaattctgtatctcaaaactacattttctcatcttaaaaagatgatttttacaagttaaataatttaatacacaggaatacactgaaagaaataggaagatagtaagtatctgataaatattagttatcacttcagtattaaataaatttgcaaacataaaatatgattagttgagtaaggtgtggtgtagacaattaataaggacaattgttagttatttgacttaacaagagattaccaacatgaataatacaaatggttatcactaattatttccccaacatcaaaacgcagattaacactttctgatctattttttccaaggaacttaactttaacttaatgccagtagacaattacggagatgtttaaaaaaggacttctccatcacttggcaacaagccaaggagatagtgagaaactgtcctacttgttccttttataaccaaactccactgccagcgggatgtaatcctaaaggccttcggaggaatgagatctggcaaatggatgtttttcactttacagaatttggaaatttgaaatatgtgcatcataccattgacacattctcaggtttccaatgggctactgctctcaactctgaaaaggctgattccgttattacacacctactggaggtgatggcagttatgggcataccggcgcagataaaaactgacaatgctccagcatatgtctccacaaaaatggaacagtttttcaaatattataacattaagcatgtcacaggtataccacacaaccctacaggacaagcagtcgtcgaaaggtctaacaggacacttaaggagatgctccataggcaagctggtaagtcaaaaccccccaaacataggttacataatgccttattaacgctaaactttcttaatgccaatgacagtgggcagacagctgcggaaagacactggactacgaaaaaaacagctaaactgaaccaaccagtgtattacaaagatgtgctgacctcggtatggaaacctggacatgtattacgttggggtaggggttttgcatttgtctccacaggagaagaaaatctttggataccatcaaaattgatcaagattcgagttgaaggagacaaccccctcgacaaggatgactgacaggtattttctgaggaactgccctctataagtcaaaggacattacatgtatggatactcaaggaaagaacgtagctataaccatcgaacaaaaggaacgtgctatacggtaaaaatttacagctgtctcttaaataactatgtctattcatttcctggtccctattcaactaaatcgagactggatttagagttgggtttggctttcctactctaaaatccaagtatgttatttaacaacatttaaaagtttctgtgttatatcaaaaagccaattgctataatacagaataaataaagaataagaggactatctttgtttttcttggtttttcttttacaccctctcagaatcgttagccaaggttcatcaaggtaccttttccagtacacatacataaacaagcgaacatttctctgatgacacttatgtttgagtcccatacagccaccaagacccatcctgacagcaatccctacatgctccggaaaaggaattggactacaccttcctgactacactggattcaactcactccgtttcgactgacactccaaccagaacctcgagtgacgacttcaatcaagttgaggatttcaacgtagatcttcaatcaaacaaatcatctaacatggactagatataactcactagagactttccctgtactggcatttttttttccacagggcccccacatgaccatcttcgtcccgtttcagcaggaagtaacctagaagatgctacgcccccgttccccattattgtgtattagggtagtgtaagcctagttaagaatgaccttcttattgtttagagttgggattggaagaaggtgttcaagttagacactttttccacatgactttaagacttagctaaaatagacataggatgtatcatagcagattattgtatattcttgtattccacccttatgattgttagttttggatattttacactattaagtttcaatcctctcttagactaaaaggggaattgtagggagtaaccctagccccgcccaatagtcctggggcaggtaccaggtggacctggggactcgcccataagggcggggtgaaggaaagccgggatgacgtaaaagggacttcttaaagggcggcactggggaccgcgggctctctttgttctggctgcgctggctgggttcttaacctagctctggcctgtgtttcacccggctgtgcttggaaataaagagactttaatccaatatctgtcccttaactttcttgtctttccatgcataggtgctgcatgtaatcagtattaccttttcagccctgtcatgccatgatactgtgtctggaagtcaagttcaacatggcataatcttaataaaaggcaggctaatccaaagagcagaaagttatgactcaccactggtattatctggctaacaacatcatgctagagatgatctttcctcggtattcttacttctcagtcttcctttgctcaaccttaggaaaccttacattgaatgtatgtcattttaaagtcttttgaataatcacatcttatttctttaagcaatgtgtttacttctaaagataaaaatgtttttctctaatttgttttgttttctatattttcttcttccaatagaaataccattttggttttaaaaaaattcattcattattgttttgtcttcttgaataatatagtatgctctcttacgaagtcatggtgcaaaaatacatttgttgtaatttatgtcaaagatatttttagcactgtgtatggtgttcaaaatctcctgtggcaaatattatttgaatatagaaagagaataggtaaaagcctgaaaattgatgaagatgaatgtaatttggaccactattaccacccttgtctctggaaacaactctgataattaacccaattctatataaactgaggaaaattttatttttatagcatgaggtttattattagaaattgagaccaaacatgtcttttgagtcttgattatttctcttaacatataattcttaacacctgatttacttatattttgcaaaatattttttaaaaagaaatacaaatgagagagatctacaaagccctgatctttcactggagtaagactttctttttccttcttgtctttttgcactcctttcataaaacatttaaatggaacctcagcttcttctgacctgacctgcaaccccagactgttaatcccacgtgtgtactattccttgtactattccatttccagcgtgtagtgccagttcctttgctaattcctgctgagaggaatgaagagacacagaaaagcaagtttgcttctgttcctgtctggaaaagggagagggtgggtgctgccgttctccacttttgttgaaattctatagttagacacacttaaaactaacgctgtttaacagaatttagctttacaaagacctgtttttaaatgggctaacgtgtctagagggacacttctagcacatgactctcaaaaacacgcctgcgctggcggctattcccaacactgtggtgttgctctgggtgtgtgttgtcacattaatagaggacatcaaaactaatagagatgtgctggggatctgcagagtgtgaattattaagttgcctatatgggagagtattaaatgaacccgggaagcagaggcattttttaacgctgtgtttgtatctgattctttctgttttcataccttgatggaagccgagcaggaatgctaacaagaaatttcaaacagataagagagaattttaaactgttgccatcaatctccacttctgtcagcacacgaaataaacaacttcaaatgaattagggaacaaggcaagacaaaggatgtggcagagaaggagtcagcaacacctttgtctctccatttattgtagagctcaattaaccaagtcttaacttcaagagtgctgagtacccattgcaccctcttatttctgtgccacttgacgagatatccaagggcctgagacaaactgccttgaaaagtcttgatttcccatcacatagcttttctcatgaaatgcagattttgttataacgcatctccttcttcagagtaaaacaaaataaacttgaaaaaaaaggaaattgctttcttactgagaaaattaaggccattctgggaattttaattgagaagtttcttaagccagtgattcatagaagtaatttacatgcatcttaaatgtctcatgaatttcatcatactaacacaaacacacagaacacacacacatatatatatatatatgtatatatatatatatatgtatatatgtatatatatacacatgtatattatatatgtgagtacatactatattgacatatatattatgtatgtatgtatgtatgtatgtatgtatgtattctatatgtgtttcccagggttttcacatataatcaagaatttcattcttcaactcttttaatatcatgggtacactataatttatagtccataattataagtatcctgtaccaactctttgaaagtagaactagtattcagaggcttatagaggagaatggactacaggctttacaatgactatggcaactatgataattgtgtactattcattccctgattgtggtaaaatatttgtaatattaggtgtactactaaagcagtgaaaacaagcaattaatttacactaatgagattttgttctttggttgtctataattgttccatctactttaaacttagctatagtcttgacaagttagattgatcaagtctttttaaaagtacttacctattttaataaaaaaaaggtttctacactatatatatatatatatatatatatatatatatatatatatgttaagcagtatgataaacctgttataaaaaacaccagaaaaagtctgatgtcaaaccattggcttttttaagcatatgttaaatttgagaagtatgtacctattctaaaaattgccaataagacggaatcactccagtgtctttttttaagagtcaagatatgtcatagaaggacaacaaagcatcaactaaactagatcagttatcaggaaattaattgggaaaaatatattgttacatctataatccaaagacaaaatattgcgttcatatttattaccatctgaggatataagagcacatgtaatattaactaaatttaaataaaaacttgagaaatgtgttcatctttcctgttgagtcaaaattgctttttttcaacttttttttatttgaattagaaacaggattgtttttacatgataatcccagttccctactccctcccatcctcccctaccaccaccccccaactaaaatcctatctatcacatatcctttctgttccccctggatggtgaggccttccataggatgtcatcatagtcttttgtatctctgggatagggcctaggcccacccctgtgtgtcatggctcagggagcattcctctatatgaaatgggctcccaaagtccacacctatgctagggataagtactgaacttctacaggaggtcccgtagatttccggggtttcattgttgagtatttgttttatatacttgaaaaaattaaattacaacttaattgctacttaatatcagacagtaaacacatatgtaagagtaaacactatgttctcattataacaaagctccaattgttttgtgttaaaagggagacaatcgccaggttgtggtgtcacatgcttttagtcccagcactcaggaggcagaagccggcagacttctgtgagtttgagaccagcctggtctagaagagcttgttccaggacagcctccaaaaccacagagaaaccctgtctcgaaaaaaggggggagtggtagagtatctccctccctaacactctctctctctctctctctctctctctctctctctctctctctctctatctatctctatctctatctctatctctatctctatctctatctctatctctatctctcagtctctcatctatctgaccaaaccagacagtactttagctgtgaaaataaagagtgaagataaaaattactactttagtaattcctaatattgccagtggattgtattattatgcattgtcaatgccaataaatcagaatgcatcagagtcaaaggcttgaactattttctacctaaatttctgaacccaagtgttaagtttttttccccagatatacattcatttactaatctagatacttatctgtggaaatttcattttataactataattatgggcccaaattacttgtacttaaaacagattacttttggtgttatgcattgtttaataacacaaaatctttaaatgcagagactctctgcttgagcaaagtgaaagagatgcaaaagtgcagacctgaaagaaagctgccatccatattgtcaaatatttatggtagtgacatgatgaggaactgtgaaagccaactacaagttggctgtgatactcaatccacatccagcaagacaatttaaagagctgtattctccatggcagcaaggtattgagttctgcctataatgaggaggagagatccatcttcactgggatattagccactagattagctttctccagtagttctaataaagtgccacaagctgagtgactttaaaagaattgacttcagcagtatagcacttacgaatccatcttttccttatgactagttccaaagccttggttacagagatgctcccgagtggattcagtgaatcacaaaataatctgtgagcatgtaggaagagggttcaaagaggaagggagtaagagaggctgagaatgacagtaacaagcatgaaatatgtcatgatatatatgtagagatagatagatagatagatagatatacatatacatatacatatattcaatttaataaatttaataaaatatttttaaactagttttttatttcaattttccaaaggcggggtgtataaaaatcaagatatttcttagtttttgatagtggccatctatatttacactccttggctctatactgtaccctgctaatttctgcatcaagaataaccaaggttcataacacctgttcctatttgtaatgtggcatttttctccttttgtgaagaagtcaggtaaatgggattaggaatatttttaatgtatttgtcttaattcgatcatatcttcaaggattctgtttccaaataagaacacattcataattataaagggttaggaattcatctttttttttggagggggtagctccacccatagtttctgctagactctgataagaggatttaccatgttgctcccagaccactaacacattatagagctataaaaactcgcataacatcataattccttgaaatcacatgtgattcagaaacaaatacctttatttataaaccccagtattttgttttatgtgtatactttccctgagtgtctatatgtagagccaatgcatacagtatccattgacagaacaaatggaacctctaagtggaattccagacagcagtgagatatcatctttttgtgtgtgtgtgtgtggtttttcgagacagggtttctctttggctttggaggctgtcccggaactagctcttgtaggccaggctggtcttgaactcaaaaagatccacctgcctctgcctcccaagtactgggattaaaggtgtgcatcatcaacgcccggcagtagtgagctatcttatgggttctaggaaacagaactcaggtcctctgaaagagcagcacatatctccaaccctgcatgtccaagtatttccaagaacttcagttccatggttcttgactcagcagtagcataattcctttaaaaggaatagacctgagaatttaaaacttgaaggccaggaatggagataaattatgttgcataagtgaaaatgtgaaataattgtagaaagaaaggaaatcttcaacggtattgttggaggcagcttgaaatccatatgaaagaagacttgaaagacacaatcaagcaatttagaagccacacttgataacaaagttactgactaaatatgttttccattttttaagcataagtatacaactgtattttaatatcattttactatgtaacaacagtaataatgtcctggatttcaatttctttttgcattcaagtacctctaagaactcagcaaagccagagaagcctgccagccatgtaagttagtgaagtatgattacctattttacaagaaggtaaatcaatgcatggtaaaatttagaaattaatccaaagcaaaatcttctgtaccagatacaagcagtttagttacaaccagttatgtccaaaggataaatggctgcagaaataagagtgagaactttgtcaaaggggaaacaaagtctgttatttcttgaagcaaaaacatgaggataaacatgacaggtgttggtggcgcacgcctttaatcccagcactcgggaggcagaggcaggcacatctctgtgagttcgaggccagcctggtctcctgagcaagtgccaggataggctccaaagctacacacagagaaaccctgtctcaaaaaaccaaaaaaaaaaatgaggataaacagaaaaaagaactataaagttcatgacagtctatgcttgatataagagacttatatgaggacttatggaatgctacagtgttggaaccagggatatcattttgtatttgtttcaattttcaataaaaatatggaaatagcaggtaaaattcagggagcagatggaaatatattataatgcatgaaaaaaatatggttaatttccaaagaaaaataaatttaacattagactggaaaaatggtaaagaaatgcaggatgaaataaaagttgtgtgtgtgtgtgtgtgtgtgtgtaataaaacttggtttaaaatgtagtggatcaggggaactagagagatggctcagtggttaagagcactgactgttcttccaaaggtcctgagttcaattcccagcaaccacatggtggctcacaaccaccctgaatgagatctagtgccctctactggcatgcaggcagaagaatgtacacataataaataaataaataaataatattaaataaataaataaataaaatcttttaaaaaaatgtagtgggtcagtatttatccctagtacattaatggactttgggaactcattccacatagagggagactctctcagcctacatacacggtattgggtctagcccctgctccaaatgatatgatagactttgaagattcccccatggaaagcatcataaaactgaaatgctagagttcagggctggagtgatgtctaagatgttcagagtactttctgacattacagaggacttggttctttctccagcacccatgggatagctcaccactgtttggaatgcataatatgaacattctttttctagcctctgtggatactgcatgcatggggtatgcatacaaatgaacaggcaaagcaaacatatgtgtgtgtgtgtaaatgtgagtatgcatgtatatgtatgtatatacacatatatgtatggcagcatatataataccacatgtatacatacatgcataaacatttttaatatgctttaatggagagtcccatgtctttaaaatgtaagtgcatcactttaatatttaacataaacaggaaaagtctctgaattcccagcttttaactgaatccttactaatgatcaaatgcctcacgttctactcaaatagcttcaagtcaattgaatatattagcttgttttgtatgcataattatcttataaggaggtaatgcttcaagtgtgttccccagattccttaaactcacctaaaaatgtacaagaaatttaagtgaaatcccctccccagacttcctcagacatcccaagggctgtgacaaaatgtgtagtaagaggatgaggaggcaattttagttcagcatcacactgactcccattggtgaaaaagaccatcattgtcatcaccagagagcctgttcctgcttccatattgcaagagatattgtaaaccttgcaaccacaatcatgaactttatatgtcaatgctttgttacatctgcttattcattctttcccctccagaatatggttgtgacaaaacgtggatcataaaattatttaaaatattgtttaaagtgagtttttcagcaactaataacacaacagaatttaattatttgaacacccagaagacagattgcccttctgatcacaatgttttcttcatcttctattgatagacatatggaggttactgactgtcagggacatgacaatcatgttctgactcaagcataacagaatgtaatcgctaccatcactacttgtgtgattgtacaggcttgttgctatgcttctgaaagacagatactttgcaatcaaatttgtaccagaatccaaatagctcatataaccacatgtataatagacacattaataaaaagggggaaagagtaaaagataaaatgtacacaggacataaatgtttaaccaccacatagagtttgaataattaacagaatgataccctttagtgcagaatcccaagtctttaaaatgtaagtgcactatttcaatatttaagccaaaataaatgaagtagttgcagcatgagaactacacatctagccaatgcaaggaacagatgcatcatagtaataaaatggcttttaaatgtgaatcggtctcataaggtgtaagaatttccctaactaatacaatttacccagaataagattagcaaagacaatttttgaagtgataatattcattacctccacgttttataatagagctggttcagtgtatctgaagtggtccagtgtgtgtaagctgaactttcatcatgtctaaacagtataactgatagttacttgataactcttttatgaagcaattttttaataatgctttcatatttctggtttatgatgccattaaagtcatcatttgtcacattagtaatagagagattcttaaaatatctctactagcaattcaggatggcttttaatgtcagcataaattcctgtattactaaactagctgtttgaaatatgaacagtgctgttggcaattccaaaatatatatgacaacattagtagataccatagatcccctaggtctggtggagagcagttagaaaagtaaagaaatgacactaagatagtctggtttgaccttgtgatatgaattaagagcaaagaaaaatgcttaatttgattgcagaatggacccatgcaacttctgttctagggttatttatctcccataaaactaagcaatttaaagtgaagaaagaaaggggaaaagtaacttgtccagaatgatatttaattatgaaaacatcagagttcagaatcaaggaaatagtctgtagcccttctacaaaagccgaaatactgtatgccaggcttctccccacccctactcacatcacagcttgacacgggaaggggggtgtctagaggcccatggacaaggcttcagagctctaaaattagactgcaccagctgtgcatagctggtattctgctgcaggctgtgtccatgtgtaactacagcctctcatgtcatccattgctttgcttttggaaataaagtatcatcatccaaggacaagcccccttccccactactggcttctgggagggcaaaatgcatccagtgtgttcctctgctctgtgcatgttttatcattgatgtaaaggaagggctttatatcatagacaacagctctcatctcctaagaggtgttttttgttcatacgctgcaacttagctctttcatttgatgagtatgtaataaaacttacttcagaacccaagacatgtgtttatgataagtcagataggatttcactttattaaataatactcactattctttgaaattttgtacatttatataaggtatattgatcatattaatccaccctatctcccacaaattccatatagtaacagaagtctgtcaacccaacccaacttcatgttctctttttaatgctacacatgcatataattagtgttgcttgtaagtgtagctacctatagggacatgagcattctgccacaggccaagacccacaaggagaagaactttccttcactatgcagattttaatatatgtattaatatatacatgtatgcatatatatacatatatgtatatatattcacccaacataaacagtatattcagcaattggctcttactatctagttatagtggacaaccaagaacaatgacaatagcctgttgaggtgtgagtgcctctaggccctccctgtccaataagtcataaggagttaacaaatgcctgggactgagatttatagttcacgtatgtcctctgggatcagcattgtccacccatgcagaatatatatatgcactagtttatcaactataaactatgactggtttatagattaatgagtttccacaaggcctattcaagtctctttagttttgctaacccactccctactatctcttctccgaaatatcccatccccaattaaacttcccaagttttttaatgttttcttttattgcactctcttctaactgaaatttgtcttgaattggtaaattatatgtatagcaatttggataggaatgtcctacataggctcagatatgtaaacactcagtctccagttggcttcacagtttgaaaggtttaagaagtaaaacttgctgcaggaagaaatatggatgtagaagagggctttgagagcttaaatctttgttctacttcctgcttgttctctttgctgcatgatttgaagttcaagatatgagctctcagttttctcttctggcaaccatggtaatgagtagaattgacttaccatatacctatattaaataccacgaactgatgaaccaaactcagaatttccttcacttgtttgaaaaaaaatctctgattccagagaatactatggagaattggcatatcgcccgatctttaagccactggagaaaaataagaagataaaaagctgcataaggtaatcactgtgggagagaagggtcttagggcagagaaatagaacacgggtgatacaaaggggaaaatggtaaacagtttgggaggatgtttaagtggggagaggaatagaagagcagaacagagtagagtgagggataacattaaggttgtttagaaaaaaaaagcataggtatagaaatctgctattttgtgagatttgaaatgtatgatacaggagtttaatcagaattaccagaacttgatactaagttatcattgctaaaaatgtcatgtgtttttgtcacaggccatgtacaattatagtcagcattaagagaaacctttctccttcctggctagctttcctaccagaaggtatcttgcagactgttaggagagaaaagacatgaacagacttacccatatgtgaaccctgtgaactacaataacaaaagccatggagagatatgttcatcagagtaacagtgtcatgaatgttgtgggaaaaaccaagtcctttgggattggatttaaaagcaaatgaggaaacagttttttggaactgtaaatgtttccaagaatccatacttaggaagctcataggccctacagatgaatctattactatcattttttaattaagagtcaaataatactctaaattggtacttttatatccataaatcaatgcagctttcagacagacctcatcagagataggactttatgtctgtttgttcttttgtttgagtgtgcttgtgcctctctctctctctctctctctctctctctctctctctctctctctgtgtgtgtgtgtgtgtgtgtgtgtgtgtgtgtgtgtgtgtgtgtgtgtgtgtaattgcccatagtacaaagtagctacctcagaaagaaattcataacaagtcaaaaggaaaaaaatgtaagtataagttcccaccacgaaaggggacatctatatcataatcatcttcctaaggattgggacccattacaacgagaagagagggcagcagaaacatggtcagacccagaagttggggaagaatggagtgaaatagaattactgcatatgacagaactgctgtactcacaaaatcactgcagccatatttccttgcatgtcaacatcccaggatagagcagggagaggctcaggagccccacctcacaggaactattgacgggtgcttacttccaagaagaggaaatcagtcgtcatcagggtgtgtgcctgattaagttgactcttttccagaggctgccccacatctatgagtttatgggcagaaccaaatttacttggtaggctataaattttaaaaggagtgggggtgattatgataaaatacattgtatcaatgtatgaaattctcatataataaaaatatatcttaaaagaaaattactgggaaaaatagaacacaggtgggagagcagggaaaactgtgaacaatgtggaggattgtataagtgaggagaggaatggaagggaaggacaaggaggaggatcagtggggagaagcatttaggttggttgattcttttttttaaaaaaaaaaaagcatgtaagaggaaatctactactttgtgagattttaaatgcatgcatttcttcaaatagttacagacagaagtggggtgactatgataaaaatatattgtttgaatgcatgaaattatcaaataattaataaaaaatatatcttaaaagaaaatcactggaaaagaagagcataggtaacacaatcacaggtgatatgcatattgtaaaaaaaaaaaacagatgcttaatttgtgtctttctgatacaatatcttcaagtacatcacatcagagtgtgctgttactatctccggaaaaacatcttatttaactctagtaaagacagtagtactgaacgctatttggtcctatcaaagaagaaaatcgtgttctttcaacatgatgtatagtcctgaatgacattatattcagagaattaagccagacacagaaagtcatagtccatgtgatcttacttgtaagtgggtctgagaacaatttgaacactcaaaagctctgctattactgagagatggggagatggaggatagagaggttttcatggaaaaaaaaaaagatttgattactatgaacaatttccagttatctgttacacagctaggctgttacagcagtattatacagcaatgtatcatattttgcagttgataaataaagagatactaaatggcctcaacacaaggaataaatatcagagaaaattatgtattagtttgtttcattaagccagtccatattgacacataattcagaatacactttacacaatacatatataaaactatgttaaattagcagtaaaattatattaatggggaaaagataaagtattttccttaaattgttatttgcaatatcaatttctttaattaatgaaatagaaaacatatacttcgatatgatacttatatccaggtatattatttatggaagaaaacaaagttacaatattaattatgtatcctctttaatgcacttcttcattcctaataaatcagtgtaaattgcaattcatattaatttttcttcatataaaaagtattttttgcagagtgtggtttgataattaaccatttgtatctagggaccatttatttctaaatctgagtcatgattatcttttaaagcagttaccttacgttaattgcatgaaagtgatataataatcttcagatgacttcagctgtctgctaactttttataagcttaattatataattatatagcttaacattctatataatatgctgcattttcttttagcacaatgcctattatgatggtatatgttgaataaatattttaataacaataactaaatcaacatattggccaagatacaaggaaatcacataagacccaaggaaaaagataagatgtggtgagaatgtatcatatcatcacatttatctattatattttttatacccaagagcataatggcatgcttgaaatttttaatttttataaatttatgtttgtagtctatacaggaaagcaagttattcttagtcattgatatacttccagtatcttactaattacaactcagacatattctaaataaaatattgcaatttattaagtatctttagatacaatgaaaacaaataaaaccaatgttaacctggtatgcctatgagctgcaaaatatacaatttgttcgttctgagagatgaatgttttctgaaggacagaaaaaagtctaaagttcacaaaagtcaaatgcttactattattacattaacaacaaaaaagaaaacataagcaaaataaagattggacttaccatattctttgaacaaataggttctccaaggacttatgccaggtttactttcaagtcttcttagaagagaggaaacaaactactgaggttacaagagactggatagggaagcaagcactccccttgctagcattctctatcagtaacatttagaaggaactgccctttgagttagtaagatttttattctttgcagttaccttctgacagaataacaaattttagttttgaattatttgaagaaatttatataaataattatttagcactgtattgaccatcatgaaatttaccttcatctgacatgaaaccttattggcattttaaatatttgattaaatacaaatatattaaaactaggggatagttggaaagaagcaaaataagcctggataacaaagatacagaaccagaaataaactgaagcttgaagccatgtctaatttcctttagctaaactatacataccattaaaggatgatggaaagatattttctggggtggtctgaggtgagatttcacaaaatacatctaatatattcatgcagtgaaattctaaactgcttgttataattaatgtctatttattcaaagaagagctatagtaagagaaaataatttgtaaatgtttaactttgagttactgagacacctgtatttctgcaatgattgacttgtaagaagtgaggagtgcaaaggcacaaaaacgttttccaattgtagaataaatattttattgtcattgtcgatcagctggagaaggtagtctctatacttcatatttttaaagtatttttaaaaggcaagatttaaatagctggtagtcgcttatatcttctaaagcaggattcaattaattcattaatggtaatgacaagattttcctaattggctgcaacaaaaactccctcttttaaactcttttataaaaatcagaagggtagtatacatgtgactttacagtctgcagcatcatcctgaagctgcccagttcttgttaagggaaaaacaaactgaaatacttttcatcaagggaagaagggcttggtgctctctgaaggcccatattacattcctgaaaaatcatttgctacagtttatatcccagaatatcaaagtccttatgataagcatgtctgttctcaatttatttcaccattattgtaggggcatattaatgtttaaatcttccacagtgaacaataaaatttcctaacagcaatctttaaagtctccagaaagaagatggggtcccaccacacagattccacttgattcaacttaatgtctttgaactagtatacaccactcaacgatgagtttgggacgaatactgctctagacaatttcagattagctagcagagatggtgcaccttcttataaccctctggccagagcttcagatatgaacttcagacaagcatcacctgcactagctacaaatgttaaagctagtcctcttgagacttaaccattgctttagggtttgtttgcttttgttttgttttgttttggtttggtttggtttggtttggtttggtttttccttacagaattccatagggtaaccactgccccataacagcaggaagtaattctgaaaaaaaaacaaaaacaaaacaaaacaaaacaaaaaacattgcctcctttccctacagttggcttaggtgatatattgtttgtttgtttgtttgtttgtttgttttttccctagaaaatggataattatcacctgcttagggttggtttcaaattgcatagggttgggaatggaagatgatggtcagattcagaatctctttcagaaaagtttaaagggtatggatgcgatgggatataggtagattaacacatcttgtgaactattttagcaactattagcaatagacaacttacattgttatagattcttccataatgaaacttatgtaaaattaactttgtattctgtcttggataatttgtatatcttgtttacgatgttttgtcaataaaaaaacaaaactttctttatcttattctatgtatgtatgcttcttcatattttgtatattgataaaatttaggatatttttgtcatgtttcactatacagttctacctctggtcaagacaattcaattctacctctgttttagagatttacacacacacacacacacacacacacacacacacacacacacacacacatttgatgtcattggccttgttacacatcacttttaagatcattaaaattattttgggaaacttctgtcactgagaaattatgcttttgagaattacaaattatagttacccaggcttctaataccttatgatgttagtcaggttctttatgtgctcagagatgtacccaacatagatatttgatcttcaaacacttcaaagacctacagaacatggtattaaaatgttttaataacttagactccatttacatgagatacaattgctcctgatagcgctgagctattccaaagagtatgaagggcaccaatgacattccatttggagtccattctcttcttggctactggccttttgggcaaagaactacccccaccttgaccactgactttggacatactgtcctaactgggctagcaggagatagacttaaagatactgctgaaccttgtcaagtcagggtaagacagtctttcagtttcccctctactctgttggtctgttagatactctaggccttatccaaagttagttgtcctgacattactgtgagaccttgggtgactgtccaggtagcctgctgtttcagtctttgcttacaagtcgcttgcttgaacttcctgccttccctagtaatgttattttccttctcaggtctttgatgaagttaaagactagacagtcttagctacatcctctcttatcttagatagaaagtactaggtacaagacttagacttcccagattaggactgctattcagagtaatatctgttacatgccattactctaaaactggacatgtagcatgtgattattgctcaatgttgctcttgctggctgtaggtttttatttgtgtatgtttttacctttcctggaatatacttgacttttttttagtattgcacacagtttttgcatcaggcttaaaaccttctttagactaaaaggataattgtagtggcatctcaccttgccagtcaacttgcagtaatggccacaccctttggacatgatttcaggtgccctttaaggtagaggagcagtgtgtgtgttcgagcttaggtcatggagagcatcagaagggcagagactgcaacttctgaagcagaaaggctgtggtggttatttactcttatatgtgtaagttgtttccaaatgaaacacccatttatcttttatcttaggtctagtgaactcatttaaaccccaccttaacatcatagtgcttgggggttgacaaatcactgtaagaatctgtagaaatggatccaaaatgctgtatcaaatatttccagaagtatattaaatatttttggtatgtatgtttttcaaattaaaaatattgcttagacaagtaggactgtggttgtgattttactatctaaccttacacagacaggaagagaacaaggaagaaaatgtagtgggaatactcaaacggatacaatgagacatgtaaaatgagcataatttatatagttacatgtatttgatactttctctgtcctattttccatgttattttgtgatttttatcttataagcagatgatactcagtaacactccaggtgacaatttgctttctcccacaaacaaagctccatgtcagtacaagatgaagtacttagaaatgtcaaagtcagtctccttgagaaatagctgaaatgcatttgcagtagtaaaacaattccttccctaaagtttcagtgtcattcttcatgtcagctctccgaagccaggcaatggtcatacatacactttcaggaaaaaggataaaaaatacccatagaagccataatggtgacaagtgctgtgcaaagatttggagctataatggtacttcagtgttttgaactgtgcataaatatgaaagaattggctcttccacatcaacaaaaagagaatgtgggttgcactgaaggatatagtatatcactagacaaattaattcccttgaactaggggcaatttctccaaataatcagcaatctggattcctactacacatgaatgcattggtgcattgttgtctcttctgtaactttggggtaaatttgatgctatattgtcattttgtaaatagaatgaaaagttgtgggaaaggcccatagtatgatggttgcacagatagccccagaacagtgtcttccataagtagagaatacatatccttctcaggagcgcacgagatttttctctaaacttgataatagcatggaccacaaagaatgctttaacaaatgtgaaaaattcatttcccacttctataagacatcattagaatacaactagaagtttaaaaaataatattaacagtggatccttgaagaaattagggtggaaactaaggttttaccatcaaaggatagtgaaagcacaatatgccaggacctctggggtacaggcaaggcagtcttaagagaaaagttagtaactatgaactagtgctcatgtttaaaaacaatgagggagtaatctcagataaataacctaatcatggaaatagctctaggaaagcaagaagctaagaagctggcataccactaaggccatgttaagaagaaagtttttttttcaaggtttattacattaaaactcagagggatctcatataaatagtccaaagatatacaaagctttagaaaattaagaagaagctaaactcaaatggagtaaaaaaatttaaaaagatagcaaaaattaatgaattaaagtacaataaaatatataaaaattaaccatacaagaagttggtattttgaaaaaataacattgaccaacccactaatcaaattaacataatattaaaaagatgattcgaattagaaataaaagtgaatttttacaatagacactaatgaacctaataagatggtcagggaataacaaaatcattacactagttaactaaaataatattataacaaactaagaatatctagaagagctggatgaatttctaaatgcacaagacagcctaaaattaaaataagaaaagttaaacagtcaaaatagatgcatagaatgaagcaacagaaaagactgaagtagtaacatcttcccactaagaggtgtccaggaccgaatgaatttactgctgaattctaccaaaatgtcaaaggagatctcacaccaacaattatcatcttgttccacaaaatacaaaggtaagacacactgctaagaacaatcttctttaccaccagaaatatgggcaatgatgtggagaaaggggaaaaaaaaaaaaatatatatatatatatatatatatagtttaaattaggaacaagcttgcttcacgagtcaatccctccctcctcccctcctccccctccttccctcctcccactaacaccccccacccccccccccctctgctccccagggagggtgagaccctccatgggggatctccaaagtctgtcatatgatctggggcaggacctaggccctcccccatgtgtccaggctgagagagcatccctccatgtggaatgggctcccaaagttcattcttaacaccagggataaatctactacccgaggccccatagactgccaaggcctcctcactgacacccaagctcagtgggtatggatcagtccaatgttggcctcttagccatcagtcaggggtccatgaggtgtgggaacttgttaattccctatggaaatcagtgtggaatcttccatatgccctagctatagaactttcaggcatatacctaaagcatatcaaatactactagagaaaaacctttacatctgtggttattgctagtctttacacaacagcaaggaaagatatccatcaaatgatgaactaatagcgaaaatgtgatacatcaacaataagagaactttattcagccataaagaaaatgaatccatgccttgtatgggaaaatacatggaactgaaaagtattttgaggtatccagagggacattgttgaagttgacattgcagaacttttagagttactaacaatgcaagatctactttgtgatggggtggtcaataaaggacatcgggaagaagcgttttaaaagatcattatattagcctggcattggtgacacacacctttaatcccagcactcaggaggcagaggcaggcagatctctgtgagtttgaggccagcctagtctccagagcgagtgccaggataggctacacagagaaaccctgtctcaataaaccaaaataaataaataaataaataaataaataaataaataaataaataaaagagaccactataggagaattattttaaaaaataacatgaaagcacggtgtgaatagatactgcactaagccaaagagggcaagggaagatttgaagactaaatgtgtgaaagtagcaaaaaaaaatatatccaacagaaaatttgatagcagccaggctgtggtggaacacacccttattcccagcactttcgaggcagaggcaggcagatctcggtgagtttaagaccattctggtctacaagctagttcaaggacagtctccaaagctacacaaagaacaactgcctcaaaaaaaagttggatagcagaagtgaatgagtgaatagcaggaggacaaaataaagtgaaaaacatctaatgtgatatttgtaaattatgggagtttaaaggaaatggtgagcaaatgtaccaggaatgggaattgggatctaggcttctttggtgatattagccaacagaaaattgaagattgagataacactgccttgactggagaccatcaaagaataatgtcttcttggaggaagcaagtgtcatatgcatagatagacgagaaaaaatattcaaagaagagtttgtgtgcataaatgattttgatatcaagaggcatcagttccacaatagtacttaaggactgagcaggggttctaagagcctaacaggaatgagcatagaaggaaatgtatgcagagaagagttgcagctttaagaattacctttaacagtgtggcaatggtgacagtgaggttactaatatttgtttccgtggacagcatcaagtcagagggtactcattgaaaacaaaagaaagaactaagagacacactaagaaaaaatgcattctgggtcttactttgcaatcttccaaataaatgtctttggaaggatgagggctatgaagacttaataatagtataaatggtacttagagggcatttgactggctacttacataaaaggtccttataaaagtagaagaaactaaattgccatcataatttttaaacatgtttttatttgaccaagtatgggaatggggtcacatcaaaactttatttctgttataaaataatatagatgtgtcccctcttaatgatcacatgaaaaataatgagtaaatttgatcacttacatgtgagagctcttccaatttttaaaatcccttttaaaaactatatacatcatacagttgtaaagaagcctgttagcagactacagaattaacataggtaagtctttgtgttggtttggctaggagtgcgccatcagaagatgaatcagattctagatatactcatatgctatgaccaacagggcttactgataggttacatgaaagacttagagattgtgaaaggtagaaatctctatattccagggtttctttagcaattttttatgtctgtgactttttttgcctgtatgcatatgtgtataccatgtgtgggaagtgtcctcaaaggccagaagaggaaattagctctcctagaactggaaattacatgtggttgtgagctgttatgtgggtggtgggattgaaacctagtcttctggaagggcaatcaatgatcttaaccatctctccagccccaatttaagttgttgctgctccccaccagggattggatggggagatttgttcacatattaagacagaaaataacagaaacaggtagtcatagttatcaggagcacaatcgtgaatgtattgtgctgaaaatactaactaaatattcaagtggacaactgactgattagacaagtacattttgaagaaaagtttagactagagttataaaattggaatatatattagtacacagagagagagagaaagagagagagagagagagagagagagagagagagagagagagattcaaagaacattgactttaggcagagagtaaaatagaataaaaaaaatcaatccccaggtcaaagcacagaaaaggaccagagaacattctcagtgattaaaaacctgtaagtatttggatgcatcagttgtatttgtaattatatctttgtattaatttcactgtgtgtatgtaaatattatggcatccatattgaattcaatatatatatatataatatatatataatcgaatgctaatttgatatcagaaatcaatttgctttttgagttctcattactagatatcaaaggaatacccaaaatatgttgttacggatgctttagtcactttaatgtaaactttcatttttcaaataatttttgttacaactccattacaattatcatcacattaattctttagtacttttctagccaggctcctgacagagacaaccctctaattctcctcagtggttttcccacatacaacattattttaacaatcaagataaactgtaaatgggtcaaaatacttaccctatcttacaaaactgttacacaagtcagaaaatattatgagtgtgaacattttagaaaactgtagtgcatgctttaaatgtgtcctatgtcagctcgttagaaagcactaacaattacttcaatttctacttacattttaaaggctgtgacgatctatcttgtgcatgttgggaacaaatgtgaagatatacttatatggaaaaaaagtaccttattggatgcatgaccaatttgaaaaaagcagtttctctcaggaaatagctgtcatagagattagctggagaatgaccaagagcagtgaagatagcttgaaatgattagaaaccacacaggtagaagtcttttttttttttttttttttggtttttggtttttcgagacagggtttctctgtatagctttggagcctatcttggcactcgctctggagaccaggctggcctcaaactcacagagatccacctgtctctgtctcccgagtgctgggattaaaggtgtgcactaccaacaaccggcttacacaggtagaagtcttgtgaacactaactcctcatatttctcacattgccttctttgataagtgttttattattgtattaagttaggtcaccccaatgaaacattatagaattatagtcttagtccctgtggaagtgtctttacttcatatgatttcattatatattagtgtttgttctgatagccctgtagacatatttctgcagttgctataaagtggctaaatatattgactatgattttattcacacttctttaacataaaagcataagtggtagacttttccctcaaatgcagtgctataagttacctcttgaagcatcggtcatactcaaataattaggctttgatagctgcataagccatcattcttgtgtttacttcaacttccagagggtcagattacattttacattcagttatggaaattccctctcccctcctctcccttctccatctatatcgaaatccatatccaggtatatgtatatgtatatgtatatgtatatgtatatgtatatgtatatgtatatgtatatgtatatgtatatgtaccctcttatatacccttgaccatttctcaatattttaattttcatttagctaatactgttataagcatttctgtgagaattattacacaagtggggcataaattataatttaaatgaacaaagattaataccacaaagatcttagtaaaactgagtaaaatggaaatttagtctgtcaacagtggcccaaggccacttaaaaattaggcagaaaccttttcttacatttttgtatctctttttaaaaattttaaaactatctcttctcattttcataccaatcccggttcccactccttcccctcatcctcctctcccttccttcccctacaccctcccttgtcctccactcctcagagagagtaagacttcccatgggagtcaaggaagtctggcatacctctttgaaacagaaccactccccccccaatatataggctgagcaaggtatcccttcaaaaagaatggcctccaaaaagccagttcaagcagtagggataaatcctgccagtggccccacagactgcccaaaccacacaactgtcacccacattcagaggacctagtttggtcctttgcaagtccccagctgtcagtccagagtcagtgagctcccactagctcaggtcagctgtttccccaaaatggtcttgacccctttgctcacattattgctcctccctctttttgactggactctagaccttcctgaactgctgctgttctgtcttctcccttccttgcctaaaaccttccacctccacacagtacctccactatcgctttctaattagacatgtggaaaaacaaggagcactgaggcacaggacaatagctgaatgacagggagaaaatgcgacactagcagggcacattttttatgacaagcagacaaccttaggattcctgattaaactataaatgaaagaagcaaaagcaagacaagaataaatacagaatcaatgttgaagctttccccgtgacaaaggtttttaaagtagcaaattctcagtaattattctcagaaactgaatagtcccaggcagtgttctgaaggggattctggagcctgttctgtataaaatgatcctccccaacgaagcccacttttatgacctcctatggatgctagacagcctctcacatgcaaatcggttttggtggatctatactgagtcatcagtaggctagaagataaatctgtgaagattgtgtagagaactcagtaattagcaggaaacaagtttctgtgtgatcagagctctgtgctttccgaagctgtaagaaaaatataaatctgttccttaaactgagataacatggcaaggttttttattatgatttcctttgggttcctatggccttccactgtaaagcttgagtatctgttaaacctcttcccttaccagggaaatggctccacggtcaggtgaatatcctttagctccagcaaagtcttttctcaaaaagagataatagatgcagtattcccatccactcacttcatcataataaactcttaaacaccatgacaacctaagaaaactcataatgagcccatccacaatgcactctcatcctgttaccatgtggatactgctcttaatttgaaaaggtctcaatatgtattcttcccacatcaaaacccacaaaaagtcccctgagtatcagcattatatattcaattagtttcattgctaacatttttttcataggatgggggatgggtatacttttgtttatatttactagatgactagaattgggtaaaaggaagtgttgtattgtattggtttacttaatgtcaacttgacattaagttaactcaattgaaaaaaaaatcctatcagtttggcttcttggaaagcctgtggtgtgtgttcttgattgataattgatataagaaagccctgctcactgtgggtggtgacaactcctggtctggtagtcccaggttgtaagaaaacatgttgatcaagtcatggagaacaagccaatgtacagcactccacggcctccaatttgctgccttgcttgagttctttcttctttttccctaacttcctttggtgatggactatgatatggaagggaaatcaaataaagtaaataaactctcctcaagttgcttgtggttatattttgtcacagcaatagaaagcccaagacagctgtatacaacatatgtttagaatttacctgcctgttaattcaagaaaacgggattggtggggttagagatggcaagggaataatcattttcagggatttttgatagggcctgtctttacaaaataaaggctagaaagagaagtaccagtactggtaagcaagcaaaatatttgtcttaacatcacaaaacagacacacaaaacagatactgtaatcttctgtatcggcatcttctattttgttttaaagtttggtaggactattgccacaattacacaatgcagaaataactcaatgaaactgcacaggaaccccttattcaacactttgctttgctctcccctttctttgaggaaatctgacgttataagcataactggtcctctgtggactgcttaaataatttaaagatgctgagcctcatattctacagcccaaagatgctgacattattttaaattaggtttttacacttaaaatgtattggagtgcatttgagggggatgaacttttgctacctgtgcttttttttttgttttctctgggaacagtgttcagcagacagagttggaatgaaacaatatctccatgcttcctttctaattctctaccttcagccaaacagcacaggcttgagaaacccatataatgacaatgtggtaagttcagaatgaattctgaatgcaaaagaacttgctcctatttggtgagaatagaaaaaagaatactaagtattttccaacaagagcagtagcattgctcttatgatgtgtctcactgctagatacattcgggttctgctacaacccaaaggatatttgtggtacacaaagcacacacaagggctctctgaaacactggactgtgagcattgctttctactgtggtaccgatttgaatggagtcagctgtgtctcaataacctcaagcagaaaaggggttttattagctggccctttagtctctgcacaaaggcagacagtcagctctatactgttccaacacatactgccacatgaggctttgaagtccctaggttatacggatttgggtcagaggcaaagctcaaagttgaactagggcttcattcaatcggatattatctgcaatcaggcatgctccaagttgccatgcattgcacattggcaaggaaaagaggaagcaggaaatacattttactttaacaaattggcacattgccaagttttcacggcatgaaaaattggagcccctgggagaagtgaatgtttggaagtgctaaccctcctgccctacagcattccaagtcagtcagatggtcacagccatctctgccagaatactccacattagggagcaaagatacaggtttctagcctcacaagctaacatgagcagggcattcaagaccacgaattcaaatccaaaattgattcttatttatcctaatgtctaggttttgaaagtgtccttttcacttcttcttgtcctgagttctccttccccctctcttttctctccctccctctcttcctccctctctttcttttttccttgttcatcagagatttctcttgccattaaaattcaagatgcttatttcccagagtatggtgattgtgttttatttgaatgaaaaaaaaaaaacatggccattaatcatagctttcatatacaaaaagtaaagctgattgtaaagaagagaaatacacccctcaataagagaaaaaaattaaatcacaaactcacacaaataaacccagatcaggtgctgatgtactagcaagccatctttgacaaatcttagtcacaatcagagaatgagtggttgaaggtttccttatttaaagatatcaatatcacaaagacatataagttcccctgtatttaatgcagaattgacaagagcccatctacaaaatcaagctacatatcaatcaatatatgaaggggaaattgtgatctttagaaataacaaaacataatcagaccttaagaaaaaaggaagccttaagaactacagtacagaggaaactgagaacttggttaactgaaacaaggcaagcacagaaagacaaataatgtatgattttatacatagattccagtaaaaggaaaaagcttagaattagagaatgaatgctggtccaaggagctaaactggggttatctgtgaacatgctggtgagaagaaacaaaacctcagagaaggaaatgtgtctagaaaacccatatataccttgcagagacagacagtactaagagcacattgccttactgtaagttactgagagtttaagtgttcacaccagcaaaatacactgtggtacgtctaccaggaggtaaataatcactgtccacctcttccagcaggtcctcaaaggtgtggcactgtcaattcttcccctgagagatcacataacagcacaactactctttcccttaaacttgcaatgttttgtggtttgggtgttttttttttatattctattttaacagccactgggcatctgaactgattcaatattttgctataatgaataagatttcaatgaattttcatgcaaatatgtgcttttccttccttttcctgtgtacttaaaagaactgttgggccatctaataattcaattggtggcctttgaaaattttccttactgcttttcagttatttcaatcctcgcaagcaatccacatggtttctgatttgtttgcatcctgcttcaatactcatcgttacctttcaatgtaacaatgttttcatactgttgcaactttttatattttccttgaagagatttctgatgaagtcatttgttttgttgtattatttatacaagattctttttttcttttttatttaaattagaatcaagcttcatttacatgtcaatcccagttccctctcccgcccctcctcccctgccccccacaaacccccatcccatcccctttctgctccctagggagggtgaggccttccatgggggatcttcaaagtctgatatcatttggagcagggcctagaccctcccccaggtgtctaggctgacagagtatccctctatgtcgaatgggttcccaaagtccatttgtgtactagataaatactgatccactaccagaggccccatagattgaccagacctccattctgacattcttgttgaggggggtctggaacagttctttgctggtttcctagtctgggatccatgagcaaccccttgttcaggtcagttgattctgtgggtttctccagcctggtcttgacccctctgctcatcactcctccctatctacacctgggttccagggttcagctcagtgtttaggtgtgggtgtctgcttctgcttccatcagctactggctgaaggctctaggattgtatataaggtagtcattaatctcattattggagaagagcttttaaggtagcctcttgactattgcttagattgttaattggggtcgaccttgtagatctttggacaagaaaaaatttaaatattgttttgttttatttttaggattataatataattacattatttatccccttccctttcctccctccaaactctcccatacaccactccttggcctctttcaaagtcatgaccaatttgtcattaattgttattagataatatatgtatatctatataaatatctattcctatatataacttacttagtcttgactaacccttgacattgtgacacaacatagttctctacaaaactcatgtgtgacaactacctgatttagatacaaatattattaaaactttcaaaatacttaaataagcatatgataaaaagggaaagcatatcgaccccagatgctctttgggaggccagtacgggactaatccagccccctgatcatggatgccaatggggaggcccctgcactcctgggagcctccagaggtggactggcgttttgccctggtgtgtgtgggggacttcgagagcccatcccacttgaagagatgtactctgtctctgaacacatggggagggacctaggcccagaacaggaatatttggtggacttggtggagccccggttaggggccctaccctgcctggggagtggtgggtggatggggtgggggtaggttggaggtgggggagaaggaatgggggtgaggggagggagagggagaggggaattacatgtgaaacaagcctgttccctaacttgaattaataacaataataataataaaaagagagaaaaaaataagcatatgataatttgttatgctgacctcagcacttcttgagcacatccagccagtgggtaacttactgcatttaaacataaagttacctgtaagactttaattaaaaggaacggtattgaaaattgtgtgtgaaatgttacatattcttttgtttatcaggttatagagacagggtctcatgtaccttagactaactttacactagctatgtacctaaaggtagccttagttcttgattctcctgtcttcatcttaatgtccagctcaatatgtagtctttttgtctaatatctatatgatgttcaagtatgttttgtgacttgcctttttagtcttttaatgataaggtgattaaatttgatatcattcagctactgttttcatttatagttatgttgcctttctatctcaatgagaaatctttatttaacatttagataagaggttctcagcctgtgggtcatgatccttttgaaaggatcacattaatttatagtctggaagcaaatgatagcaaatgtttgttccctattctctttctttgttatattcagtgcagaaactcagaagatagaatagtcccacatttaattaaagtgggtactctcaccttatcatcttaatttagctaatccttttcaggtacattgcaatctagacaacctttcataggcttgctcacaggattgtctcctaggtgatcctagaacatgtaatgttaacaatattaaccatccccaatcctctgtcaacttgaaacccaaacacatcacttttgatcagtaactttcctctcctggtcccataggcccatagccatctcaatgcaaaatacattcattctgattccctaggtccctgaagtctttaccaattcctacactgtttaaaattccagaatgtcttctgagacagaaggtaatcttataactgtgagcttctataaaatcaaaaactagttacatagtaacaatatacaatgtcataaaataaatattccaaattcaaaagcaagaatgaggacaaagcaaaggataatcaggccaaagtaagaccaaaccaaaacctagcaggacaaacaccaaatatacagccttatgtccaccataatggtcttgttatggaatcattcgagctgcaaagggactgtgtagacgcatacttacactggggctgcctataacacacatagtatctatcttggtttggctccattaatgaattagctttactcagaaaatactccatagtctggtcatttctattctatcctaggatctttattacagcctaatctgcatcttcacagcttcatgcaccaacctctccaggcttccttgcagaaattctgacacattgcccaacttattttgcccaatcaatatttcttggaaaccatgaaacaaggctctctgactgtcaatcttgaatcttttgcacatgcaaaatcaggactacatggatgatactactaaatcatgcttcaagattaagatgaaacctggtctccttagaccacagctgtaatggtatttgaatgccttcttggctgaatccataaattcatgtttctatgaagttgttttccagcataaaagttcccatgaaacagtcccagttcaggcttcctctttcacataaatctgcaccttcactagttggagcctctcattggagtaatgtatcttcagagcacttattgtttagtcccaataaagagcataaggtttcactttaacaattgcaaatgctttgtagtcttcactctcatctacaattttaaactggagcataaaacttttcttcctaaactgtgaattttggtttcattttgtgttctctcactgtagatttgagtatgagcaatgagctatagccaattacagactgaatcccttgctgtctttaaatttcctctaccaaataaagtagttcaataattttaattcagtctcatataaattctaaggacacaaagaaaatacagatacatttcttttcagaaattttaatgaatggcatttagcaaaattcctaatagattccatgagatcacatgtgccatggcttccctggatgtttaattcttagcagttttgtatcccaattatagataagaattctctattaatctacttgtggcacattagggattttgtatcccagtgacacagttttcagcattcttaccagaaaattgctccaaagatctgagagccacatggtcatcgtcaggcttattacagtaaaggggcacatttctcaaaaccaattttctttaatagttaattttactgatgccatgataaaaaaaaataccctgagcaaaacaacttacagtagaaagggtctatcctggctcacaactgaagatacactttatgattgtgggaaagtgaaagtcagaaagacagatgttggaggtggttggctacatttcatccacagttaggaaggagagaatggtgaaagttcatgtttatgtcactttctctttcttgttcaatccaggatcccaaatcatggaatactgtcatctaattaacctgtctagataatccctaccagacatatcaaaaaaccacccatatgtagataatccctcacaagctgccctagaggcttgtctagatcattctagattaggtcaaattgacaatattatcacaataattaatagatattttgtgtgctgaatgcatggtgattttgttggtaatgtgattttaacagcagatacccttttctctgaaggaacactttcaatatatcactaataaatttcattataattctaggtatacagagataaatttttatgttggaattattctgtccctcccttcagttcccacagcagtttatgaaacaacattctgaggcttaatatcaactacaatcgtttggccaatgactcagacatattactagctagctctcacttataaattaatctatatattgtcatgaggctgtggcttaccagtaatgctccagaatgctactccttcagtagctacatggcatgtctctgactcccccttccttctctcagcatctttgtttggatttcctgcctagctgtattcatcctgatcatcggtcaaaacagctgtattcatcaaccaataaaagcatatttgcagcatataaggacatcccatatcatctccccctttataattaaaaaggaaggttttaactttacatagaaatatatatatatatatatatatatatatatacagttatcaagcaagaattatagttacaatatttagtccatttgcatttggcaaaattagagaaaatacactatcatttatcctactctgtgagtctaaagttttatgtctaatttacctcttatcataactaaggaaaactataattataactatatatcttcaaccctatcaaagatcctagaaggatataatatttcctaagtacactgaaaatgcattgcaagaaacttccaaaatgatagagacatcaagacagagacatctggctgactggacaatcacccaacgttcctttgcaatgcttaggcatccatcgtcagctacaaagttctcagtgaagcaggaaatttgaagatctattctgccttgtactgacaaagttcttcagttgctttctgaagaatgtctgacagttttctctgtgaagcaggaacccctcttatcttgtcaagtttagcagtcactatcctgtgggtcctgtatgtccagttcataatcacactgtcaaacagtctagtcaagagcaatttcttgcccaaatatctagtcctgccacactaaaggcaaactccctaatgagtttctttaatgcccatcatcctctctgaagtaactgatgctaccaggagcagacatgtctcactgttgagaaaagtcaacggtcttaaaacattttaaatgccatattatgtaggtctgagaagtatttgacaattacctatccatctgaaatacatcgctgtatttctagaaaatctaactaatgtgactagaaatttgactattatagatgactattaatctgcatttaattatacattacattttaaatgagctgcataaacataatactttaaacaagagtagaaatatgtacagcataacaaaattgactttaaattttatcaataaacaaaaacccataccagtgtattcctttctacaacatagccccttttttctttagaaagagattgaccatgtccattcacatatataaacaacatcctttaaatgaaaataaatatttataaacaacatttggaagtttgggtgtagttttctagactacttcttgctaattgagggctctgttaaacttacagggatcctgagacaatttagaaatatggttaaatcctggctgcagtagtctgtgaggctgtatcttcttagccagttgccttagagctgttctggaagttggatcacctgggctatcacttcaggtggtcttgtttgatcaaaccacattattctggaaggaatccacaggttccaatcttctgtaggaacaaatgcagaacctcttttccaaagtaacatatccttaaacttaaattttgaagtcaaaatacctttaaaatatgtatgttggtttagcccctacaatcaaatatctctctgaagttagttaattaaacttcaaaaaatttaaagaaagcacaataataaacataattcaaactttctgtgtattttctgtctttacatggcccatttttatgtttttattactctattactctatttttttctataaggacttcagtttattatccttaaattttttgactctgcctatcctctatctctctcaagcccatggacatttatgaaacacactgtgatctgtttagaggcctttttgtctgaatctgtccttattgagtatctgtaatccttttctgaacaggagagatttttagaatgttaagcaggtgtgactagggctggcagcttcggcatctggctctatgaccttctgctttccaactttgcagagatacattcaccaccagctatggtattgctgagcaggagccaggctaaccacctcaactctatgaagcagaatgtaacatgctgcccataaaccttctttgtcagtatgagtaagagataaatctgccatgatgctgcatgacctggaaatgcctctctacttcagcaggagtcctctatgctatgctcaaaaccgaatgctgaggcatctgtgcaccatggccttcatgagaaactgaaccaggaagctgtcattaactccatatatgtattgtagaacatgcccccttttttatttagagaatactttattagtttttgtaatcaaacccacatagataagacctgacatatttaatatagtgtgttacccctgtacaaatggaaaaaattaagttcaacgtttctagaccaatatggctgttaatttctgtacaatgccaactcaacatggtaaactgggatacttttttccaaagttaacagcacagctaaagtttcccaaaaaaaaaaaaatatatatatatatatatatatatatatatatatataagcagtatgttatgtatcaatagcaccaacagcttttccagattctgcagtcatttgaagaaaattgtagagacatacagcacactccattaaaaaaaaaaaagtaaaaaacaaaatcccagaaaacagcacagttgctcaggtattgctcaacatcattaaaaacagctctgataaagcatggtcactaccatgtatcataaagcaggtccacatatgagtgagtacatatcatgtttgtctttttgtgattaggttacctcactcagaatggtttcttcaagttccatccattttcctgcaaatctcaagattccattgtttttttctgctgagtagtactccattgtgtaaatgtaccacattttctctatccattcttcagttgaggggcatctaggctccttgcagtttctggctactacaaatagtgctgctatgaacatcattgaacagatgtcctttttgtaggactgtgcttcttttgggtatatgcctaagagtggaattgctggatctgtggtagactcattcccattttcttgaggagtcgccaaactgatttccacagtggctgtacaagttggcactcccaccagcagtggaggagtatacctctttctcctcatcctctctagcataaattgtcattggtatttttgattttaaccattctgaaaggagtaagatgatatctcagagttgttttgatttgcagttccctgatggctaagaatgttaaacctcctgaaactgagaagcttctgtaaggcaaaggacatagtcagcaagacaatacaacagcctacagactgggaaaagatattcaccaaccccacatctgacagagggctgatctccaaaatacaaagaactcaagaggctattctccaaaacaccaaacaatccagtttaaaaatggggtacagaactaaatagataattctcaatagaggaatctaaaatggctgaaagacacataagaaagtgttcaacatgcccccctttttcaagctttcttagatcttataaacctgagagtcccacattagcatgccagatgtagttggaagttttctgtccctcctgtcaattccctcagtcacttatgaaataacactctgagacttaagaccaattataattgtttggtcaatggctcaaacatattactggctagctctgtcttaaaaattaacccatgtctattaatctatgtattgccatgagttgtggcttaccagtaatgctctggaatattactcattcagtggctacaaggtgtctctttgacttccccttccttctatcagcatctttgtttggatttcccgcctagctatattttgcctggccattggtcagaacagcttcattcatcaaccaataaaaacaatgcatatttgcagcatgcaggacatcccatctccaattttatcacactaatgacttacctttccttttatcctcagttatctacctacatttttagattataggtactagctgaagttcatcaaatactatacaaaatcaattaagatgaccatgctattatttttcttaaaatatgttaatgttataaattataaaactgacgttctaaagtaaaattaaccttattctcttgtttgcttacaataaaaaccaattagcagataatgagaaaatgtaaatatgtagatacattataattcaacaaacttagtgtacagaggcaaatatttttgactgattaattgaaacagcattttatctatatttaaataagtccctatgtacatagctaaataataaatactcccacttttataaaattgcttgagctgcatttaaaaaagaatagagtaatacaagagaaacactcaagaaacttccatttcaagggccaaagcagagatttctgtatcatgttcttgtccatgaatttgggaccatctctttcctgatttgcaaatagtcaaataaatggtatgttttggttactttcctgttgttatgataagaagttatgacaaaggcaatgtacagaaggaagagtttatttgggcacagggttccaaagggataagagaaaatcatgacaggaggaatagcaataggagcaggagcaagaagctatgagatcacatctttgtattcaaacatgaagcagagaaagaatattgaaaataggataaaatatgtcctatgaaagtctgctcccagtgacacacttcctccagcaaggacatacttctttaaagcccctaaatggtaccattaactggcactcgagttctcagttgaggaacatttctttttaaatcaccatgatactttcaatttgggaatataatccttatcacagtttggttaagactgttagaacctaggagctcatttccaatcagtgtccttccataaattttattttaaaaacaaaatgtgtatgttgatgcatctattttgagaaagaaatttctacaaatcaaaggattcactttcttgttttacaagacgtttaaagtagtagaactgatcttcacactatttcattaaatagataagaaaataatgcttctagaacttctccctacattctataaagccaatattaccctgataccaaaacctatacaggcacaacataaaaagaaaactatagtccaatatccttgataaacataaagcaagactttgatataaaacatgaaaattaatccaatagcacactgaagagatcatacacatttatcaagttggtttaatccgatgaatacaaaaatagttcaatatatgaagtcagcaattataaatagtatcaaggattaaaatcatctctgcaggtgaaaagtaagagcctttgataaaacttcaacccctgttcatgataacagtcttcaataaaatagatgtgtacagtttatacttcaaaagaagaaaggctatatataataatctcataaccaaaatcacattgaatacatttactagtattatccaaaatagttcttaaaattctaatgagtaattagacaaaataatatgaagtacagaaaataaaaaggaagatgttaaattatttctgtttatagataatatttctatatttacaaaatgttagaaccaccaaaacactttttaaaatgataaatgcagcaaagaaagcatcactttttccttagactaataattagtacattgaaaagaaatcaggaaaacaaaacaaaatagaagagggcctgtttgtggagacagagtaaagttaagagagaaggggacaaaagaaggtgcatgttatcaaaaaaccttgtatgtatgcaagaaattgtgaagatgaataccatctaataaaataataaaataaagggaggcaggaagatgcaatagtgcagagtgcagtttagaaataacctcctgacaggagtgtggtcttcagcagtagcaagaagaccagaagatccttgggatttgagtgagcattacagtcagtgcaaaactgattacatccaaacatatcacaagcctgcttttttgttgttgttttgcttttgttttttcttaagctatccatggaactcacaacaccaaggtctggttgtcagactctgcatacaattgttatggttttgtgcatgtcgtttgtgctggaaagtcaggatggatcaacatcctgaggggatatgagtagtcacacctcgggatgactgcagttggtcaagctgaatctttgaagccacaatggcagtaactgagcctagttcaggaaggattccttagattttttttttttattagttcaaattaggaacaagcttgcttcacatgtcaatcccttctccttctccctcccctcccccaacccaccccccaaccccacacctacaccctaccccatacaccctccactccccaggcagggtagggcccttgatagggctccccaaagtccaccacatcatcctgagccaggcctaagcactcccccatgtgtccaagctgggagtgcatcacttcacgtggaatgggctctcaaagtctcttcttataccagggaaaaatattaatccactaacaggggccccctagagtgcagaggcctcctcattgacatccatgttcaggggtctggatcagtcctgtgctggcctcccagacagcagtctgggttccatgtgctcccccttgttcagaccatctgtttctgtgggtttcaccagcctggtaccgaccccttcgatcttctttcctccctctctacacctaggttccagagttcagtacagtgtatatctgtgggtatctgcctctgcttccatcagccactggatgaaggctctaggatggcacacaaagtaatcatcagtctcattataggggaaggtcatttaggttatcctctccaccattgcctagattgtcaattggtgtcatccttgaagacctgtgaaaatctccttagtgccaggtctctcctcggaactataatggctccctctgatatggtatctctcatcctgctctcctctattcttcccccaactcaacatttctgctcctccatttcctcctctcccctcctcttctcctcctctcattctggcagctccctctcccctaccctcatgctcccaattagctcaggagttcctgccgcttcccattctttggggtccatgcattttttcccttactctttcttgtttcctagtttctttggtgattcataggctggtaatcctttgctctatgtctaaaattaatatatgagtgagtacatactatgtttgtctttttgtgactgggttacctcactcaggatgatttcttgtaatgccatccatttgcctgtgaatttcaagattccatttttttgttgttgttttccgctgagtagtactccattgtataaatgtaccacattttctctatccattcttcagttgaggggcatcgttttatcacatgagttttcatcaattgtatttccagatattttattttgattttaaattctttcttgacattacaattgctcaaaattattttaattcattttattcccttgttaatatgtgttcatgatttcttttatctatttgtatcagtcttcactttattctttcttgatttagacgtccttgaatttaggaaagtggcctcctcttagaacatttagatccctttagacatccctgccaggaaaggattaacatttatcctattttaagacactttttttaatgtgacacaagttactatgttttgattggaataatatgtatatatatatatatatatatatatatatatgtaatatttatgtgtataacaactataatataaatgttatatttataaatatacaatgctataaatatttataaatattacaccagtagcacagacactgagatcaacaattgataaatgggacctcctgaaactgagaagcttctgtaaagctaaggacacagtcattaagacaaaactgcagcccacagactgggaaaagatattcactaagtccacatctgacaaagggctgatctccaaaatatacaaagaacccaagaagctagtctccaaaacaccaaacaatccaattaaaaagtggagaacaggccgggcagtggtggctcatgcctttaatcccagcacttggaaggcagaggcaggcagatctctgtgagtttgagaccagcctggtctacaagagctagttccaggacagcctccaaagccacagggaaaccctgtcttgaaaaacaaaaaacaaaccaaaaaaaaaaaaaagtggagaacagaactaaatagacaatttgaaatagaggaatctaaaatggctaaaaggcacataagaaaggatgttgccttagccatcagggaaatgcaaatcaaaacaactctgagataccaccttattcctgttagaatcgataaaataaaaaacgccaatgatagtttatgctggagaggattggagaaagaggaacactccttcactactggtagcagtgccaacttgtacagccaatttggaaatcaatatggagactcctcaagaaaatgggaatgagtctaccaagatccagtaataccgctcctaggcatatacccaaagaatgtaatacaataaggacatctgttcaacgatattcatagcagcactatttgtaatagccagaacctggaagcaacctaggtgcccctcatatgaagaatggatagagaaaatgtagtccatttactcgatggagtactactcagaggaaaaaagaatggaatcttgaaatttgcaggaaaatggatggaactagaagaagccattctgagcgaggtaacccaatcacaaaaaaaaaaaaaagacaaacatggtatgcactcactcctatgtggacttttgaaatggagtaaaagaataccagcctacaatccatactgcctgagaagctagtaaacaaggaagaccctaagagagacatacatggtcccctggagaaggggaaagggacaagatctcctgagcaaattgggagcaagggaggagggggagggagctaggagaataagaaggagagaagaggcagggtgaggaggacatgagggagcagaaagttgagttgggggaagaatagaagaaaacaagaaaggagatactataatcgaaggagacattttaggtttatggagaaatcaagcactagggaaaggtcttgagatctacaatgatgacaccaactaacaattttctgacccttttttaaaaatgtttcattcttaaagaacacaccaaattttctttgttagctcaacattcttctgtttatatatttgacataataagttatttaaagtggctgagataactaacatatcacatatttttcaccttagtttattcaccatttatcacatttaacattttatttgttcttcattgactttaacagcttaacttttttccatttgtctattccttccatgcctataaatttgacagttttacaatatacttttaattttgctaccatccctaatgaaggctctatgactccactatgtagtcagagcaaatagctatggcttttctctaaaacctttccctcactttttctttctcctataacttcacccagttaacagcttcagaatagaaatttctacttaagagagcaatctgagatccaaagcatgaatcctcatcacatttaaaaaacatatgtatactgaaatattaaagcatcatcctttacaaacacctagaaaatgtagggtggtacaggagttaacagaagcagaagctgcttggagtccctaagcctgaggattcatctcgcactagaacaggcatgtccaggaaacagacttctcatccttaatgagcagcaagcacaaaggccagccctatttctcaaaaaaaaaaaaaaaaaaaaaaaaaaaggaattgaaaatgctagctggctgaagaagtaaggtgaaagtgcctttcttctccaggtaatgggtaaaaatagattcatctgttagaaattagaaacccaagaagatatgtctactatagagttcaaatgataaaaaccacccgcagtttccttaaaatctaggccctggttcagtagggctcaagttccaacaacgctcacacacatcaagcagcaagtgtaggtatgcctgagctctactcttagcaaatagagaattagcaaaaggattactgtaaaagcttgtctgaagccctatacaagcaaacatcaaacaccttctaggactcagagaacatctcttttctctgacttgaattcagaagcaaaacaacagattacagtagaatatgaccagctggtgtgttagcattctatccctgtaacatcttaactgataaagaaaagggatatttttgactcatacctttgaaggcttagtccttaatggattagccctatgacttttttgaggcaacaagtcacagcagaagggtatgacaaaaagtgctcaccacaaggttgaggagaaaagttgagggagaggtgccaatggatggagggggttggtggtaatgagtagagacccactgtccacttaaaagacatgtcccatgactagatgacccccaactatgcctagtttcttaatgttgccaccacttcccaatactgctaacttgggaccaagcctttaacacaatatctttgtagaacagtccaggtacagactttggcagcaagcctagcagtgactgctaaaacatggaaagcaaatgaaactgagagatatagttgaagagcatttaaaggtacagagagattaaagagagaaaagaaatataagacactaaaaatgatatcataaaatttaaaaagatacttgcacttaaaagccaatacaatttcagcaacatgacacacaatccttgaaagtgtggggcttgattttgagctttaggtcctaggtcaacaaatcaacaatgaagctgcttgcatgagattatcaagaaaaaaatgaacatggacatgtaaaggacttgttctaaagaatgggtttccagtggtcgttcacccagaattttaatagctcagtaatatattttgtaatacctgtaaataaagttatgggattgttgactttgctttcaaatgtctgaaaagaaggggccaagaaatcactattatacaatagaggtcataaaagagagagagaagacagaaaggaaaagtagtttgatttcttgaaaagttgttcatatttcccaaaggtcaaaagaagatgctgagtagatagagaaatagaaggttttgttgtttttaagtatcaagaggatttttaacttatgcttccttcctttgtgttttgaagtattattttcatttacttaatgaaatatctttagagtggaacctgagggtgagcacaaatctcatttaccctgaagacaaattgctataacatttttagtgagcatttgtttcagctatgacccaaaatataagcttgggtacctaattgtctatttgtgatgtgtcatgtatcagcattctttctggatttgaagtatttgtgttttgtacattgtgatttgagatacatgatcctgcatataaaacctgaacttgttttcctgggtattttctctttgtgaaataacacaagctattatatgtgctaggggaaaaatgcaaaaaaaaaatgactgacagtttaaaacaatgctacagaggttacttcttgtaccataagaatatagtgcatgagatacgtcagtccagaataatattagcttatgactccaggttccatctccctagtctacgtcctaagaaagtatgcactcagcattcaacaagttttcctttcattgtgaacagtgactttctcctttgcaagagcacacatgtatagtgccatgaatctccagaaggaaagaagatacatttcttttcaaaatctttctttgccctgtcagaaaccaccactaaccccttagcatttccagccttaagagtttcctcaaatcattgtatcctacaggatatagaggctacaggatctatttgcatctgtctctctatggcaatcacactgcttttgccgggtcagttgtttcattttaagggactgggaaagttcatctcttggaacacacttaattctctgatcatttgacataatcactcatttaaaagaagacagcaatggctatttgctagaattctaatatctgtgccctgtgggtactaatttaagcagattcaatttctaatttcctgcaatggaagttgtatataggtagcaatgaaaataaaacctgagatttgaaggataggcagatttctgtgtgacatcccaacattcccctcatgttaccacttagggaagatttatatataattacccaacaatactccaaaacaacaaaagcctctacctctatataatacttttcagaaatgaaaagtagtgagtaaacattaaacttctcattacaatggctatgtaggaaatatgctgttttagaactattttagaacagatgtcaaagtatagatatgatattgcttaaatcttggaaatccctatgtgtgcatgtctgtctctgtatgtgtgtctatgcgtatgtgtgtctgtctctctgtgtgtgtatgtgtgtatgtgtgtctggttatgtgtgttcactctaaagataattcttcaataatttttgtgaaagtatgtcaagcaatctgattattcccaaatgataatacttgagagtgaatgtaacataaagatgaatttctggtaagaaatcatatttctcctaaagataatcacttcattaaaataatgtgtcaaagaagatttcctgtctttgactccacataatctaagagaaagtataatattatgaaacttaaataatttgatccagcagaacacagctagagagatttcaatcaggtctaaagtattttttgacagggcagttggtcactacacctttgaaaactaatgtgttctcagggtaaaacatttttaaaaaatgataatatattaactttacaagaggaggaaggagagagagacacagagagaaagaaatagagagggaaggagagagagggtttgaatattttttttctgtttagaaattaatcacaaatttctttgcaaaggtcatgaaacctcagagacagaaaaatggttacactatcctatcttgcctactcgtgatatcagtaaaaatactagccatccctatcactgttcagtttgacaccatcacagttcacatgtcggaatcacagttgtgctacacctcccaaatgatgcatgaatagattaaaaataaaagcccagactctcatcctgaccttaacatactgtgtcctttgattctcatcacaaacttacagttggctaaattttgtgctttattggggtgtataagtagggttttttccatatctaaaggagaataaaacaggtggctgttcttaccaaagctggaatatgtgttggctgtagttggaattcaagcagaggatgtcactcaaaatgtgagttaggatttggggaaaactacagggtagctacaaatgtggccagtagccaaagacatttatggaaaccttgtagtacctgtgcccataattcactttgccaaggttttataggtttacctctgtgaacataatgaagaggaaacagtttgtttgtttgtttaaattcaaatctgggcatttttaatcattacattattcaaataacaattaattatgaattcatccttaatgtgttcccataagaatgattgaacctttgtgaaaacctccctgaccatgcactaatttggggagaaaagaaagcatccatttgatttatctgctaccttacagctttaaaaagctgaaaaatgaaagagggaggcaagaagttctatacccactacctttgatcttcacaacatcatgaaaaaaaaaaaaacagaaaagtgaggctcaggtatttaatcagctaccttcgtgtgacacagataaagagagatgaagccaagatgagaacttcagacctcttcagtttaaagatcttacaacgtcaggttcaaagcacaggttggttgtcataatactgtaaggttggtagtttagcagacacaattaaggagggcacacagccaagcagaggagggccagaaaggaggtgccaagaccatacaagttgagtgttttattatcagaagtaaatttccacacatctctatgccttcccatgccttttctgttctcttttattatttaactactttcacatgtaacttaatttccttgtactatgatgagcatttaagaagataatttgtgaccttcctgcccctcctgcaatacatgaccctgggatcccttaacccatcccggcttgcctgctgccatggttgacaaggaagctgcctttggtgatgacacagtggaagaatgtgtgatcaatgaggaaccaaaaaatatggaagcagaacacccctttttgatgatttgatgataacctatggcctggagtgagccagtttaactgcccagtggcttccagatgtaaccagacctgaagggaaagatttcggtattcataggcttatctcaggaacacacatatcagatgaacaaaaacacctggagatagtcagcatccagcttcctaataatgatgctaaggatttaattccaacttcagtgatcacctcacaatgagactattttggcttctagaggcaccgatctttcagttccagaagaagcagaagatggcccaccagatggatttaacactgtttgagacgaagaccttcttcagttatttgtctacaataggtgtcaacaaagctattagcccaaacctcggatgttttcgaggtcttaacaagaagacttaattcaacaaagccacaaacttattttcacatttttcatccggatttttttttctttagtaacaagcccagggctaaagtagcttcagaaatggagcatattaggtgtgactatttttattcttaacctatatgcccaagtttttcagattctcaagtaaaaggccagagtgtataaggaatagagccaagtgaggtaagtatctgagtcgtgagaataaatattgcaagatgtcatttttattcgggaattaggggagattcaagtcatagattttaagttcctctcacctggctttccaggaggcatgttttcctatgtaaaccagacttttggtttctttagttaataccacacattcctccttccctaatacttttgctcattactgtatttcttgagctgtttccatattattcttttcctttctgtggaatgatttttgttgtatgcacttttttatttttgtttttgtgttttaacttgggaacaccaagttgtatgatgtatgtttttaagtgacactcataccactggttgaccatgaagctgaaaaaaaaagagtgaattattattttgtatttgtttttaaaaattaaattaatccttgataagagttgctttttttaggggttagtcctttaccactagagtctgatgccatttccattttgcatgacctgtctcaacatcaggcctgttacttttcatgactgtgtgagtgcttctaatggaataaattgctttactatgaaaaataaataaacaatgaagttaattatttattttacaatttggttgatgccatttattttgtttcttctagaatgctcattcactattacaatttctcaaaatgagatataagactatggtccttggtcactgaaatttcatatacaagaagacaaaaggaaaaagatgaggagtgttaagtgaaggctagtgtccagaagatatctgaaagaaatgtagtaggaaaaggagatggcaaagtcagtagaccttcagactgaaatattaacatataattaaggtgtcccttcacattatttcataaggatctgagcaagtatgtgagaatcttctcagtagctggagtgcctcagcttcacaaaaaagactgatgtaaccctacctctggcctcagaaacaatctggataaaaagggaaaatatcttcctcctgagtttttccatttttgcatagtgagacttactttcaataagagcttacaaatgagtgttgaaaacaagcttctcaaattactgattcaattttctaccagggccacaaccttcatctttccttttaattcagtcagctcatcctaatttctacttctctaattttaaattattctttgaaaaatgtctttatttaatctttgaaattttcttttacagctgacaacacattctagaggggcaaccataaaggtgctggtgcttggggattctatcatatcagagaagtcggacagggcaaggaccaactgaaagaatacaaagaaactggtttcttaaatgtgaactacaagagcttacagggatgaagactgttgtgagacctgacccaagtcatcactaatcagaggggaattttgaaccttcttaaaataagtccagagtaactaaggttatgtctctaaagaattcttttactcctgttttagttcatctaatagatggaataacagcttcaaagaagagtttgtgtttgtgaaactgtcacctctgagggggctagcatacatgcacacatgtatagatacacacatgtacatatcctggtgtgtctatgcacatgtacaagaactgcatagcctaggtctagcttttttgtgacaatgcaactcaaaatatgtgcctttggaaatttagcttttaattaaaaaggaggagaaagcatggtatgttttaatgaaaggtaaatggatcactgccttcaaacatctcccatactgcttacatgtggaaatacacagcaccatttctacaatgctaacaggtaataaaagatctcagaaaacctcagaacttaaccgtgatggaacgggaacaagagtagaaaggatcccagagatgacagagctgagagaagaatgaatagagagaaggctgaggactaactctacagaagaaagatgttggagggggcaggcaacagagtattattattattattatgttggagaggagaattcatctagggaacagtttgtgggttgtgcagaatttacagtagaataatctgcatttcattaaagagcaggattgagtggtaacccataacaataaaattagacagaaaatagacattccaaatcaaaatggaaatgaaacagtgcatttatcaaaccaataataaagaaaaaataataaagaaaaaaagcagagccaaagacccccccaaaaaaaaatcagaacagatgaagaaaaagaacaattgaaacaatgggctcgatccatgcatgtatttttaacctaaacgcaattatactgaaaggataagccaatactttatgctaattatgagtaatgagaaaacagatactaaacaaaaataaaccaaagaagccaacttagcaattttaaaattagttccctgtccttttatatggcaatagtatttgcatttgatattatgttaaatacaacaaagactctagaacagtggctcttagagcatgattttagatttggaggtttatttaaaaatatttatggagctccctgcaatgggaccagaatcagtccctggtgcatgagctgtcttttcaaaacttactctctatgggaggatgtcttgttcagccttcattcagcagggaggagtttgccatgcattgttgattcccatgggaggccttaccctttctgaggagcggattgggtggtaaaaaggaggttgtgggagggaactgtagaagaggagagaagggaaatgtggttgatatgttaaataaataaaaaaaattaataataataaaaattggaactttaaagattctttcttcccaaatctgaaatcaatgatttcagaaatgaggtcacccactgtttttgatagtcccctagtgattccatttattttagaatttacattactttacactagtggtttctgagacttgaaggcatccctctactcaaatgatgatgaggttgactctaatgaggaaatacaccagaggctgttggccaaggcagaggtggataggaacattaaaaggatgaagatgaccaactaactacatattttctatgtcttccaacataaaactttttaaaactttaccaagaaagagagaaaaaacaataacaacaaaacccagatcttcacacatacatgtcatccccacattctcaggtttatctgtgttcatatagcatatacaatagtccaggaacatgagtgccctagatctgtaccacctgtatcatggtcacactataaggaggcctgatttctatcaagcaggctgcataccagccaagcctgttgagttttccaaatcatatacctccatgatatttctacactctagggatatatcttaggttaacacagcttgcacacatacacacacccatgaagactcatccagaagtcacatttgcacactttccaaattacaattgaataatgactgctcccatctgcccaacaattaacaccaagcatctgaaagattcctacaaactttatatacctgatctgaaatcaaccaactttggccagcaaaaacagatccaaactgcatgcaacagaggcagatgataatcccttatcaggcacacaacacatggaagaagtccacatgaacaggtgacatcataaaaacatacataatgtgataggctaaggaaatatgctccccctccaaaaggacacttgtccacaaatattctccagtaagagttacctagatgatatctcctttcttgtttccttctattcccccaaactcaacctatttgctccctcatgtgctcctcaccctgcctcttctctccttcttattctcctagttccctccctgctcctcccttgttcccaatttgctcaggagatcttgtccctttccccttctccaggggaccatgtatgtctctcttagggtcctccttgtttactagcttctctggcagtgtggctggtaatcccttattacctaaagggtaatatgtctaaaatccacatatgagtgagtatgtaccatgtttgtctttttgtgattgggttacctcactcagaatggttttttctagttccatccatttgcctgcaaatttcaagattccattgtttttttttttcttctgagtagtactccattgtgtaaatgtaccacattttctctatccattcttcagttgaggggcacctaggttgcttccaggttctggctattacaaatagtgctgttatgaacatcgttgaacagatgtccttgttgtatgtatgtgcttcttttgggtatatgcctaagagtgggattgctgaatcttgtggtagactgattgccattttcctgagaagtggtcatactgatttccaaagtggctgtacaagttagcactcccaccagcagtggagaagtgtttccctttctccacattttctccagcattgtttttttttcttccattctaacaggaataagataagggatacattttaggtttacagagaaattaggcactagggaaaagtctggagatctacaaagatgacaccaactaacaatctaagcaacagaggagagactaccttaaatgccctcccctgataatgagattgatgactgtcttatatgccatcctatagccttcatcaagcagctggtggaagtagaagcagacacccacaactaatcactgaactgaacttgaatccagttgcagagaagaatgagtgaagagcaaaggggtccagaccaggctggtgaaaaccacagaaacagctgacctgaacaatggggagctcttggtccccagactgatagctgggatacccacatgggactgatccagaccccaggaacgtgggtttcagtgaggagaccttgggaatctacaggacctcctgtagtatttcagtacttattcctagcataggtatggactttgggagcccaatccacatagagggatactccctgagccaagacacacaggggtgggcctaggccctatcccaaaggatatgatagactctgatgaccacctatggaagtcctcaccctcctggggagaagaaagaatatgtgataggtaggattttagttaggggggcatggagccttcaaccatctattctagtgtctttggtatggcaaggtactctgcaggataccaaaatagaaccaaaaacactaaaccagtcacaaaaacatttgaccacaatctaccttctgcaagttgtggtacaacaatggtgatggcacacaacttgtgggagtagccaactaatgactggtttgacttaaggcccactctgtgtgacagaacccatatataatacaacttgggtgactgagaaccagagattagatagcccagagacccaggataaactcaaatactactggactaaaaaaaaatatcataaatgattcccaaataatgttctaccatactcatatgtcagtgcttcattcaatcaccatcagatgagctttctcctacagcagatgggaacagatgcagagacccactggcagacattgcacagatcagagtcctttgaacacacagatttaaattggatggatccattaaatcccttccctcacagctcagaaaactataacctggataacaaacccttctgaatcaactaagcaaggcacatatgaactcacagagactgaagccaaaagcacagagcctatacagatctataccagggcttctgcatatatattatatcttttatcttagtattttatgggactcctgaatgtgtgaatgagtagttctctgatttttgtgccagctcttgggctctttactttccgttcctttactctgcctggactcaatcttttttgatatttattatattttatcatgtttgcttattgtccctttgaagcctgtattctttttaacgagggacaaaaagggattggacaaggagagtacgggagtttgaaagaagtgatgggagtagaaggaggaaaagctgtaaccaggatagattgtatatgaaaagaatcaattttcaataaaagaagaaaagcaaagaacttaaaccaacatagttttcaataactttcaaaatcaatggcttcaactcctaaaacaataaacaaacagaacaaaaccccaaaaatcatttttaaaaaccccacaggttacttaaacagattaagaaaacaaattccatccatttgttaattacaagaaactcatctttcatgcaggttagcaatacctttgagggaaagggcatgccaaacaaatggaaccaggaaactatcccaaaatctgacaaaatataatataaactgaaattataagaagggataaagaaggatactttatcctaatcaaggaaacaaccaagaagatattgaaatcataaacatagaaatatacacattaaattctgtgcatctacttccataaaaagcatatcattggaactcaagacacagattaagcctggcattggtggtgcacacctttaatcccagcactcgggaggcagaggcaggtgaatctctgtgagttagaggccagcctggtctccagagtgagtgccaggataggctccaaagctacacagagaaaccctctcttggataataagacagagattaaagctagctcaatagtagttagtgaatttaatatcctactttctccagaggatggtaatcttgacaaaaattaaacagagaaacaccaaaattaaaagacttcataaccaaatgaacctaatatatatttatgaactattccatccaagcaccaatactacacattctactcaacagcctatggatgtttccccagaatagactacatactggtgcacaaaacaaatctcaacaaatacagcaagactgaaatagtttcatgcatactacaaagataagtcttaaaatcaatgccaactatatgaattcatgaaattagacaatatattactgaatgattatgaatgaatgaatcaaagaagtcaagaaagaaagaaaaaattctttcaattaaatgaaagtgaaaacagaacaaattaaaacctatggaaaatatcaaaagcagttctgagacagacatttaatgttgtaagcacctatgcacaagtgaatgattaagtgatatttctcaagagtttcgaaaaacagaaacaaagcaaacccaaatttactaagtggggaagaaataataaaatcagaggttaaaaaaaaacacaaaataaatgcaacaacaataaaggcaatacaaaggatcacaaactctaagatctagttctttgagatgataaatgaattgatagaatttacacaggaaacagccaaaaaaagggaaaaaaggaaggaaggaaggaaggaaggaaggaaggaaggaaggaaggaaggaaggaaggaagggagcaagcaagcttgatacagtaataaaaaggctttcagccaaaagtaactaggtccacatagattctcaacagaatccactactttcaaagaacaactacaatcaatgcttcttaatttattcaagagaatagaaacaaaagaaatacttacaagtttcttctataaagtcataattattctaataacaaaacaggtagattacaagaaaagaaaattgcaggcccataacctgatgaatatagatatcaaggttctcaatacaataattgcaagacaaatacaggcatatatcatgataattcatcacaatcaagtttattttatcccagacatttagggatactacaatgtatctaagttaataagttcaatattcatataaataaactaaagaacaaaaatcatgactatatccacagatacaggaaaagcttttgccaaaatccagtgtgacttttttgttttttttatttaaattctttaattactactcatatttacatactcatcctcccgtgttccccaccagtccccacaacccacctcccaacttctccccagggatagtgtggccctccaccagggaccttcaaagtctgtcatattttggcgggaaggcctagggcctccttgttttatctggactgcaatagtatccctccattgggaatgggctcccaaattctatttgtgcactagggataaagactggctccactgttagatgtcccatagactgtcttggcctcctcgctggcacccatattcagagggcttgtttcagtccaatgctgtttccccagctttatgactagggtctccatgctatcagtaggtcaggtccactgtttctgcagggtctccagccccatcttggctcctttgctcatccctcttccctctccacaactggattccaggagtattgttcagtgcttagctgtgggtgcctgtttctgcttcgaacagcaactggatgaaggctctaggagtggtaaccaaggtaaagagtcctaaagggaataagactgagtaaaacatacatcaacacaataaaggctatacatgccaaatccacacctattactctacatagataaaatcttaaaatacatgaaattcaagaatgatacagaaatctctactattccaattatttttcaatatagtgcttgaggcactagctagaccaatatgacaagtgagatcgtttttaaatgatttttaattgaattatctgtttctttgaggtctttgttatttgagttcttcatataaattggatactaattctctgttgggcaagactatgtgcccattctgtggacttcctctctacttggttaactatccattgctatatagatatttgtttattgttgtttgttgtttgtataactgttgttgttttgtttgtttaataagatcctatttatcaattattgatttcatttcctgttcataaagtcctttcttggagctgtatcttgaatttgtggcctgtttcttatagcagtttcagcatttcaggttccacattgtggttcttcatcctgttaatttttataaagggtgataaataagttctaaatgtcctcttctgtgctcctatatgtattttaggatttcaaaaagaaacttttgtgttgtgaggatattgttcataattgctttttccccaccaacgatgtgttagggtttttcagtaacctcatcactatttttgtcaattggtttcttgaacttaactgttctgtctgaggaaagataaaagattcaacatggtttaaatttcattttcttgatgagttaaggtgggattgtaaacttgtgcagccactgtgaaaatcagtctggaaattctcaaaaagctaaaagtagaactaccatatagcaccgctataccactacttggcatatggccaaggacccatcatcctggtgatacttattcagtggcactcaattcacaagatctaggaaaaggaaatagcctaaatgtccttcaagtgatgaatggatattgcaaacatggtacatttatacaatagaatgccattcagctgtaaagaaaactgaaaccatgaaatacattgttgaggggacgggactggaaattattgtactgagtgaaagtgaggtaacccagctccagaaagcaaaatctgcatgttctctcttatttatagatactacctctgaatctttcaatttaagtatataacctgaagaaaatacagaagccatgaaaccagaaagggaccaggaggagaaatgaagcagaaggagctctgaaaatgggaaaagtatgaaagaagaaaagaggaaaactggaagagaatacaatattaactaggcaagggtgaagaagagtaaatcaaaggaagagaggggaaggagataagtaacacaaagaatattagaaaaagttatgagaaaatattttatgtttactaaaaatgagaaaaagggggactaggggagagagagagagagagagagagagagagagagagagagagagagagagagttatgaaatggagatgtgtggtacaggataatgttgttcctccaaagatccagagaatatctgacaagatcccagaagtcaggcataggaaacctgcatttgagttgttagtcacggacttccaaaaagatgcctaaaagaaggagaccagactgacagctgggaaaccagcataggaccaaaccgggccccctgaacatggatgtcagttaggaggcctaggcactctatggggcctctggtagtggaataatatttacccctaatgtacaaatggactttggagcctattccccatgaagggacactctttcagactagacacatgggaaagggcgtaggccctgccccaaatggtgtgacagattttgatgattccccatggaaaggcctcacccagccgagggagcagaagggggatgagataaggggttggtggggggcatgggagaatgggagggagagagaactgggattgatatgtaaaataagattgtttctaatttaaattaaaaatcactaaaaaaagagaatataggttgatgggggaagtacttctgtgtatgtttatctcattgattgttgaataaaatactgtttggccaatggcgagcgaggactaggagtcaaagaggattctgggaaatgtagtagagaagtgatgatccagacaggaagtgacatggcaaggagactcatatctaagcgaggaaacaggaagtatgcctcttttcccctctgctcctgctccagcgacataatgtgatccaccagcaaggatggacaccattaggcgtctgataagataagtcttataacatatatagatttatgatagttaagactgagctaacagatgagaatcctagtcattggccaagcagctttgaacctaatacaagtttctgtatattcatttgggcctaactagggcaggcggctggcataaagcatacacgtggcagtggggctcggcagcttttggcagaaagatttatcgtaacaataggttattgattgcctactggaacttgaagggaagaccttcaaagatagcacacactccagacacaagaattggaggaattgtactggcactaacctggatacctccatgaatataattcttataacatcaaaagaatttgatatgagctgctgagtgacagaagtaatcagcaatcttacacatctataaaccacagcaatgaccagcaagataccctcaatggtataataatgtcacttttatcttgtgggtaataaatagctgtctaattggacttaaagcccactcagtaagaagaaaatcatgactgatactgcaaacctagccaactgcctgaagctggggatatcatagaccatagataaaaacctaccactgctgtgttcctaaaccaatgtaatcgtaatctctaactgcattataaataccaattcttgtacccacgtataggtatatctctcatccttcatcaccagtagcacaagaatttgaagaactgtatgcaatacatgagaaacacagcatattagcaagaacatgctgaatgtggcagcactatcacttgtcaattttctttcatttgttaataatgtatttttgttgttctcttcctggcatgttaagggttccatgtgcactcaaagatgaactgtagtccatgaggctaagacttctttattcaggtaaacaccagtccaaaacgcaagccagagcgagctcacaggaagcaagctagcacggccagagagaaggggctttccactgagccccgctccttgtgaacctccttctatgtcatctcagacttcccctcaccccgccctcacaggcatagccctgcacacctgtcccagttacctggggcagggctagggtgtctccctacactggcatgtgacttttgtaatcgcttaaagattcccttagccttgtgcatgtaagcaactggcgcacatgcatctcacctactattgtgatttgtttcatataagaaagtgagacctcttctccttttattaactgtccatgaatactcagatgttctgcttcaagaacgttctgccattttagaccagcatttatttaatcatctctctttgttccccaaactccgatcagtttctttttgcaaatattttctacaatcaaaagaaaaattttctagatcattaccaccattctatgaacccattgtaagctggcttttgttctccaatagcccctggtaagtctcttaagaaagtcatcattttaaaattactgggtgtgtgtaatgcagaaattttcctaaacaaactacctaaaagtttgaaaacgatattcacatcatagtcattgaaatatgtcttagacagattgttaatttggttccaacagatgcaggttgctggaaacacagaatatttacctccctgaaaacaatacaacttttaagatgcctaattttgaatcaatgtagcaacatattttttaaaaccctacttacagtgacttttaatatggagaagtaaaattatgagtgtgttgttatttcagtaacaggatacatcattccgtgcaaagcaaaggagagatcacaaaagctttattttgttaatgcttgcatgtttaattatgattgatatcttcctgtttgccaaaatctctgtaatgttgtgacattgtttgtacagctaaaaatccctcttttttaagaaagcagataatagttatatctcagagagtttgccaatgtttacagcacttctcacatttacaaagacactgagggacccagtatccttagcaggaaaatggccagggggtaattatgtccccttttctttggttttacttgctatatcatatctttgttctgtttgaagaactcacattagtcttgggactgttcaacaagtgaattacatagacttttattgaatatacttatatataagaaggaaaaaacaaaaaatacatgttactatcaaaatcatgaagcttccagtggtcctcacaaaattataggttattatctacagaagattaacagactttctttggactgagagctcccaaataatgacatggaactttttattaattataaaatcttggctttagcttaggcttgttctcaactagctcttaaaacttaaattaacccatttacagtattctacattctcccctataactcgttaccttttcttagtaacatatgtctgaatccctccatgtttggcagacgaatcccccatctcacctcctttcccaggtacctatttctgcccagaagtcccacctatcctcttctgcctagctcttggatggtcgctctttattaaaacaattagaaggtaccttaggcaggtgatgtaagacagagacacatcttcacacaatgtacaaaaaaataatgcaaaacacttttgagggggaaaaatcatcagtgatccaacctagctgcatacccaatgagctacaacaatgattttcctggtaagttattctcactagtaccaaggtagaatgaccactatgggggtaatcaaccactttctgattggatttggagtccattctacagtaaacctgtcctagaactttaggctgagaggttcataaactctattagagaatctactacttttattttgttaaaggtacatggtgtcaaataatggctatctaaataatttacctttatactactatattagtgctactctcagacttcataaaggcagtttcctttcacagtggacagtgacttatacagagattcataacaggttaaataaagtccaaatattaagtcactgttagcattaaagactcttaggctttaaaaaagaacctctcccaaggctcaagaaacaactccgaaggggaatctgaaacaatgtaaaagccaaagtgtaggggaagttatgaaggagtgtgttctatggatgacatgcactaatgagcacatacaactgtggctacctccataggactggcctcattgtcattacattatgtatggcagagaacatcataaggcccttcctctcacttagggataatggggggaaaaaaaagatgtcaaagtaggaggaaaattccttcagaaaggggtgagttcagtgagacaagagtatgagaggataataggggtgtggtaaaagtatccaaatcccccttctctctgtgtctgtgtggaaaattcatccattgtggattgtttcaaacaggtaaatgatagtcttgatgaagagaaaaatgaaaacctgttgaaagtttgtgagggactttgcagggaagaacctgctggctgccaggaaccttgtcttgtgagttgcatatctctgccacagcaaactgtgtggtgaagctcacacatcccacaggggacaactataattcaatgacaaggatcatccttcagccagactacttttgtacgaagattcaaagttttccaaggatgcttcctggttctgaagaaacttcaacctggaaacaggttcctacacaccttgtaatccaagccttgtgtaaatggtcctgacgtgtggaggcagggtgatgctccacatcctctgtgttcacttgcatttttgaacttttaagcatttccactattgttgtactttctctttgtatgtacctgaagacttggaagagaatacagagagtgtagggcatcatcctgctatacactaagagaaaaatataacaatgtaagtgctttaaagttccaaaatgcatatgtaatatcactgtgacattttaccttcatttcattgttttataaaattgctaaatgaaagaaagactcatttatttaaaaaataaaaggtcatggggaaaaagtgttagagatctttaagctcatttgcttgtgaaagatacagtagccctatatcacgtggaaagtataaagaacactttgtcctaagtgtctgtaggccaactgtaatatgtgaacattttcattcttacccttactgaaatcgcatcagttgtttacaggtgatgctcagaaaattggtgacttacctaatttcacataccagggtagaaagcttgacccaagatgaggcttggtagattctcaatatttcatcatgactattcctcacctaaagatacctgggattatcacaaccacatgaagaagaacttccagccacatgctccatgctgtggccacaaggagacactggctggacagagtagagatagacaaaaggcacagaaaaacataagaaaggaagacacagagaagctggagctggaatgttctgaggaagtgtctttaatgttatttcttgtgggggagcaggggaattttgtataatgaattttgatcctatttacctccctcacctaactcttccaaatccaccctcacttcctaatccagccaattttatttttcttggtttctttgttttgttttacccatcaaaatcaatttgtagtacccagatactcttggatgtataatattctcttagagcctggtccacttactagaggctacactgttaaaaaaaaaaaaaaaaaaaggctggctctccctctcccagcatccatcaattgccaatggttttatggctatgggtaggacttcatgttttcctctcccctctccacgctgggatatgatctaacttgggcttatctcttcctatgatagttaaaacttttcactctacatttaaagctaaagctgatcaaacctgtttgttgttgtttgtttttcaatgcagaatattacatcacatacttttaaaggaataattctgttgcctttttgtatgacaggacacacattccttcactctatcaagggcatcttaagcagaagaattcaaataaagcactccattgatccaataacctggagcataattagtataaagatgcccaataaaggagttgcatagtattgaatgtgcaaagcatcactttggatctgggtatcatggtcaaattatgactgctttgtcttctaaacccaaagtcatttttatggtcacgtaaaatacctgttcatctttattcaaagtaaatcaggatattccctgaatttctgatattcattgacatctgattctaaatcataactttcttccaaatttcctcacagtccggcaatgcagctggatgactctttttaattgcctgtgttccagaacagcatacagcatctttaaaagagggagtgatcttgataaaaaaaaatactgaaatatttactagagtttgaggctctgtgtaccaaggggagcattagcatggggtgtcttcgcagcacagctgctgggtcacttcagaaaatatgggtctgacagatggagagaaactagaatgaaacctgcaggtattccttgttctttctcaagtcatgtttattttaattaaattagggaaaagagagtctcatttcttaaagggagaaaatcttagaggactttcatctccctgccatttccccgtggagagttatgaatgggagcagggtggagagaatgcctctggcattttgagattagaatgaatagttttcaaaaagggagaggcatttcttttcatagacacgtttaacatatgatgttggataatctgctaaggtaacgagtcttagatttggaggtgaaacatataaccaaattaggtatcagactaattagagtcagtcagttcttgccaggaaagcctgcatttatgcctagcacatcataactgtattgcctttttaagggaattattaaattattgtaggaagatatgaatttgtaggctcatggacccacttgtgaaaactgatgtataagtgctcatttcctctgatgtcaggaaactaaatttcaccaatgcaaagtatatctcatgccttctagttttaactctgctccagctaagtaactatgttaataaatcaatgtctcccaccacgtcttccaggaaggggcaacggaatggggattatctgtattcccacaacctcacatttcttacacaatcatagccaatagtcattttacaataattgtgaatcaggaaccacttaaagtactttaaaatttgcccattttacagattctgaaaaactaacaaagcagagaaatttagatggtagtcaacatctcaagactagcaacaacttaaaccagtatacagacaagcctttgattttcaacttagcatcctgtatcctgttactgctgagagcatctcctctttacattgatacccgggcctgggtcacttgcactgaagcttcagcatcgccctctgctgtctggttgaaatggtcagagtagagcatgtcaaattccaattttgtttgtctagaactttcccttctctaagatttcagactaagaaagcatgtcaataaatatttatatgtttgtgaccatcattaatcattaagccatgaaacctgctgttgaaaaaactataggatttctgattctcaagaagtagtgggtagagaaaccaaagtctgtctgacctttccttggcatgcctatacctagaaggaaaacaaagatcctgagagtacaggcctctagttctgaaaaagcagaatctacgaaaatgaagacagttgtgtgctactatagagttgataacaataattttcctaactgcttcaaacaagcagagccataaaagcctttcccagagctgcaggtaacagggaaggcatgtgaaagagagcaaaacaacatttctgtagccaagcttatggagtagacatgaagactaagaatagggagattctctccttctttcttatctctgcaaaatgctctaggtccaaagttcaaagcagaacacagacaaaagctcaggaaagaagaacctaagtttcccatttccacagcagaaggcaggagctggcttttgctcacttctaaaaataaagatgcagagttttgtggacacatttgtggaggctgcaactcatcctaactaccagttatttccactattgagtgtgaaagaatgtgcatataaattccaaaatttaaaagtgtatttgcaaagatgggtcacttctacagagagggaaatgacatttttatccagtgtttacaaatcctagccaataaggaatagatgctggagaagttcattgactttccatgttatgtatatattgctcattagtgagagtcatggtcagccaagctctgcctttgatatctaaggtaccgggggaaatggtgcttaaccaacctgaacttctgtttacacattccagcaacactgggaagttgttttagatttagcagaagctgtctttttatgaacacatctttatagtgtgaattgtctccagtgtggaagagtgtaaaggaaaagtcaacttcaagcactatttggcctgaatgcacagatgctaagattctgttctcctggcagagacagccagctagctcctgtagaatgagccctgtgtctttctgtagacaggtgtttcctgaaaactgacaccaaaagtgtcaaaacaaaaccacaataacaggtttaatcaggcataccaaaacacagaagaagcaacttcagcttttaaaaaaagatagaggcttcaaagcaaatacaaagtgatgacttcagcaaaatgctttaaatattgtccttcacacatcacaaaaatgacaaaatatttcataattcctaacagaattatgttttcaacatctgggatccaaagaaacatcttctggggaacaaaataaggtatgtaacattactgatgggtgtgttttgattctcaaggtgtgcttcttagcctgaaagcccaaaggaatattagtaaacgtggactggttgaagggcagtttaaattatcttgatctttttggatctgaaaaagcaaatgatttgcattgggagaaagggttcttcatggtagttgcaatgtaacattccaaggtcccaggttttgctattaatgcacaggttgactcaggccccagaagaaggaacaggctggcctcaacaagcagcccaccacccctagaacaccatggatacaaaggtgctggaattagcacattgacagggataaactgaaatctagaatggattggtgaaggaagcaatcgaggatacacctttggacagcaccccaaaaaataacaaggccaagtagtaatagaagttaaaggccccaaagaaaccctcagccaaacttcaggaagttctgtcagaaacaagagggcagccttttgtaaattcctctttcctgctcctacctacatccatacatggcagaggtcctcaacttagaaggataggtcagttttattcagctgtgattctgctaagcaccaacagatgtacacctgggatattctgactactccaacactaattgagcaaacaagcattcaatggttcctttcttgacactcaatatcacaaataattgtttcctttgtgaaaaactcacatctttgtttatgaagaaaatgcagacaaagtaattctaagaacataaatgttgcacattaaatctttggataccaattacatttttattattgtttttcttttaaaaatcaaagtttctttattactccactccagagatgaggaaactctaaactacagtctgtggtcaattatttcagggtattacacacaggggaacaaaaaaaaataattgttattttatttgttttacagccttgtaatggtagctaatatatgaattctggtctgctttcatgtcttaagggagaaaaaaaaataagtgtggaatttccctgtctactttaaaggaacataaaataaagaccagtagatcagctacatctaaaaaataaattatatgacaatattagataagacaggcctattcagacagtttacttcagaggctgtcacaaatccgccaaaaatagcttaatctgtttatttaagtgttacctaaaagaaaaagaagcatacattaatccaataattttctcagccagtctagtactgaacaaagtattgtggaaaaaacctctttgaattcatactaaaactttgaattaaaaaacagtctcaactttcgtttccttccttggtctccaggttcttaatactacaacaaattcaccacatgcagtatgtatgttccaaggctaaggatggcatgctggtgcaccaggatgcgaactaaaagaacaatgggatgaggcagagatgaggcaagttttgctctgaaggcttcaattaaagttagaccatgtgctgagaggcttgatggctttgctccttgttacaaaatgtcctccttttgacatcagcattttgtttcctcgcagaagtccactgagatttggtgcatcgcatcagcgccattcagtcccacagtaaacgcactgttagacaaggtttactgcgtgtggaagctggaaggccgccgcacaggccactccagcagcttcgctgtggctctggcacctttccagtttctctgctaaatacataattaaatctcacggtcgacatggtgtgattcattcccataaagtgtgaaaacaaacaactgtgcatgcgctgtccccaatttcaaattcaaaacaaaaatatcctggaatcttctatttccctgaagttccaaatgtaattagattgattttaaaagacaagtaagtagtcttccagcttccatgtgttaaatccaatctgtcagttagagatgggggagggggggcaaatgactgagaaatgtaacatcttgatttcctctctttataatcaagtgttcaaattgacttttttcccgagaattatcaaaatgtcattgctctctcgtgcagagccttgtatatttaccactttacagccaagagcaaatgttcacaggaaagtaatcagacactcggggagtgacggtgactaatgtagagctacagcctagtgtatgagaggactgggctcactcagttctggggcctgaagtcaccagacacttaaaagagatgcccaatgcacaaagccattacagacctctgcagggcaaccctgtccttcatgccttctaaagagcttggtacacaacaaactggattcttccacctgaacctgggaagaaagtcaatactgagaaagaagctaacattatcaacatacaaataaatagttgccatgtattactacttggaaaattcaggaaaaaagcataaatgtttctggaagaaagttccaggattgccaatttttttcaataaacatatcttatagtttaattctaaaactaatactcaaagctactggatatacagtttggctaatgtgtgaatgtaaatttatggagattaagcatattatatgtgtgtatgccataaataaatataccaaatgtaaacaccattgcattactgcttttttacttctgattttatgctactatgcatatttccttatacacatatgctactattacactctctgccttctctacacattagccatactagacatattcttaaacatggcttctgaattctgtccctataattttgctaattctgcttcattaactgtgaattctattccacaaactgtcaaaacacctcccagatatttcacagccctgtgaaatgccactaactcctaaatatttgtctcctcttagccctgcatattttgtttgtactactctactgtcattagtataaattttgatattccataacgtttccttatttttatttctttctctactggtgaaatgtggtttgttgaaatgagtcatgccttacatattttaatcatattcaaagcaagagtggatttttttaagatagtacatgcttccacaaaatacattgattgaaagaagaaatgccttttagaaaagtcagagaaggtgctgggcatagtgatacacacatgtaatgccaccataccatttcagagatgaaggcaagaggactgtgagtttgagtcaagcctggacttcatgaagctgtgtatccaaaaaaaaatcatagaagaaaacaataatgttaaaaaatatcctggtatggcaaaataatgtacagataatctgacccaaataaagcataatctattgtgtaatactcgcatttatactcatctgcatactacacacactatatgataattcattatgtatatttggacaattctgttaaacactgattttcagttgtccgacttcataccctcttctttgttctatcctctctttctctgtctttgtagtataataatcttcacatccattgctcaaaaagcagattttgctgggttctgtctctgggacctgtagaagtttcatctggctttctttcaaaaattctcaatttagcaggaatgatcctgttgtctgtcagatcatgaatctcatttactagaaatattctaataccttcatgtttgcatagattcaaatttacagttatcttagcaggctaacaggctatttgcaacctgttttaccctcttactcattgctctgattcagtttatacttctacactcttagcatgttcagtcacatttgtctctgtggtttctcagaccagctcttcctgcctatggttttgcatcactaatcccctacctagtccacccatcactaactaataattgcctcccttgcttcccattgcagtttgtctgagttaaagcacgttcatactttgctatatttcacatctttttggagcagaatttctcagtcagttctgaaaaatcaccttcctactgtccatccagcttttctattgatttatcactgaattgttatttaacttgtctagtgtcttttttccctgaactacacaatataaattttatatgggtaaagatttgcatctgttttgcttatggcactgtgtagtcaacacataactggcactttaaaatatctgttgcataaaacagaagcagtgatgaatgaatttcagctaaatctctccaccttcaagatcattgagaagaaattgctttgagtccagttggactatccataatcatattgcaagttcccataactgataaatttaggcttaacattccatctgcaaaacatgtgtattcttcatcacctggactgcttactcagcctataagtcactcagttgaccacagacacttctgcctctgccagtcagccacatttgcccagaacctgtttatgtctgttgcacttaaataattacacaccttcccaaacactagaaaatcgatacagcatgaatataaaaataggatttttatcggtctaaaactcactaaaggcaagttgattttaaaaggcaaattttatagcaagaaaatattcaaaaaataagtccaacttgcttctctccaacataaaaatgcaaaaattatgctgacaatacaggtgcaatctttgttttaaataaaacttctgtagttaatatatactaatcaaaaatgtaccctgcataaagatgttcatttatattttaaaatttaaaataaataagatattaaggcttacatgtgtttatataacttttacatttaaattagctttgtcattaaaaatactcatcaacagcagcagtatgatagatagaatctttaagcttctcaattttcttctcaatacaataaagaaaatactagttatgttatctacaggaaagatctcataagaagaaaataaagttccatatcatgaagttccctgaaaagctattacacatgtaagctggtgtcataattaaatggatctaagaaaaagctgaaagtaataaaagacacctttactccttcattccccttagacatgttcttttctggaattattagggcattttcacataatactattctaaacttgaaaattcaaatgcaccaggcattccaagcataactggagcaaattcaaatgaacatcagatttccatttaaatccaattctctccatttctcctacctctttttcaaatctcagaacactcattcctcttatagttgagctcatgtctcaagagtcaaggagctcactcaggtcaacttcctacctggggcaccagctatcatcatagtactcagctgtgcctgaatgccaaggagatgccacccagagcatgagagtctgctgagaggatcatcaagtgtgggcagcatgtcacaactgccagtgagtgaaagagtgccgctctcttggagcctcagcattccagtctttccatggatcaccccaacctaaacaagtggcaactgatcctttgttgctatgcagcagcctgactatctttctctgagccattttgtcagcagtgtgacaaggagttgcaggtgttgtaaagtttagccaggtgtgtgcaactttgagctagttcagtaggatttggtgggcaaggaatacagtctgtgtttaactttaactaatgaccatttgtgattttgtgaaaaattaaattcttgggactgcaatttcctccttccagaaaaataaaagcttgaaatatacctacttcagagagaaaagttcaaagttagaaacttttttgataattaaaaattaattatgcaaatcattgtttgcctggatctacaaagttaagacattattattgttgtcattattattattattttaagtacatgatttcaaatttgatgaacttgacatttcatgcttaatattaagaactttcttttctttctctttcaaattagaatagctgttcataacatttgaagaaattttctgggttctctttaggcacagtgtcctatattgatatatgtggtgattacagactttccagtcaccataaagtaagcacagttcaattgccagaaaacacataaacatgtgtctaaatttaaaattatctctagatgtcaataccataatctttaaaacaaaacagaaaaaaatcattactaaggatacagagtaattataataattgtatatccaatctttatgtatttgttatctgagtttttattaattatattattctactttttaaaattgaaaaatagattttttttcaaaaagtatatcttgattacgttttcctaccctctactcctctcagctcctctcctccaatctggatccatccccattctgtctctcattagaaagcaaaaaggcaactaaaagataacaattaaataaaatataaaataataagatagaaacaaatacaatgggacaaaacaaacaaacaaaaaaatgagaaacctccaaagattcctttgagttcattttctgttgcccatctactgttgggcatgcagcaacccttgagaatattgttttttccacagtgagactttcttgatgcaaactgaattatcatttgcaaatggttataattggagatagattctggtttggtgatggggcatgagtccacttctcctttcagctctagaaccctaagttctgaaatatgccagccttgtgcatgccacctcagtctctgtgactcatatgtgcatcagttctgctgattcacagagctttgttttcctggtgccctccattgtctctgacttcagcttttgagttacttattaatgttgtattggccatctatggtttgttgatttagaaaaatcttttcccagtctgtagcttgctcctttgtctgaataatagtgctttttgccccgtagaagtttccaagttttatgaggtcccattaattaattgttaatcatagtgtctaaactattggtgttctgttcagaaaggcatctctatcaatgagttgaggccattccctcttttgcttaagttcagtgttaattctgattaatgttgatatccttattcaacctggagatgaattttgtacagggtgatgtgtggatctacttggattcttctaagaacagccatcagttctaacagaatgattttctgtaggtgctttctttttctagtatgtctggcttctttatcaaatattagataccagttactgatggggaatgtactgtgtatgtttatcttattgattgttaaataaaatactgtttggccaataagacagtaggttagatgggactaggagtcaaaaaggattctgggaaatgtagtagagaagtggtgattcaggcaggaagtgacatagcaaggagactcatatctaagcgaggaaacagtacgtggtccctcctttcccctccgctcctgctccagcggcacaatgtgatccaccggcaaggagagacgccaataagataagtcttataaaatatatagatttatgataattaagactgagctaacagatgaggaatcctagtcattggccaagcagctttgaacctaatacaagtttctgtgtattcatttgggccctaactcgggcgggcagctggcgtaaagctcacacgtggcggtggggctcaggcagcttttggtggaaagatttatcgtaacaagttaacaataagcgataatgttcttgttcactgcaaaggtttgttactcatattggttaataaaattctgattggccagtacacaggcagtaagtacaggtggggctaccagactaggaaagttctgggaagagaaaaggcagaggcatggtcagcaggccaaagaagaagaagcaagacatgaatgccttactgagaaaaggtacaaagacacgtggctaaacatagataagaagtatgggttaatttaagttgtaagagtttgttagtaattaacctgagcaataggccaaacagtttataattaatattagcctctgtgtgtttattctggactaaatggctgcaggactgggctggacagaaatttccctctgcatgtggcacccaagtgtttggaaagatcctgtttattcaaacaatgagcaataattttcagaatgttaaaaaacaactgtgaaataaacaaataaaaagtttagtaacaaaactgtcttacatttctatttgaaccaactaaaataaatagctaatgatgctttaagaagacatttatcaaaaagcccctgatccaatatttgactaacattaaaagtaattttgacttttttattcttcatcaaatgctggattttttactaatgaagagtgactcagcttactgagaaaaaattatactggtctataaaattcacatggaataaggttggtgacttgctattttcaaatatgaggtactttttattctaaaaagcatgttcattttctcacagttaaagcttcattaacagaaaaaagtgtcatatttcagtttttttcagaagagctatttgccaaggtcttgaaagtattaccacattatgtatttaaaatatccatgctataattaaaactgtatagtatgatatttcatcaggaaatccaatgctatagctgtgatttaaaaaaaaagccatgggaagaatacaacggatgctaaagtatccctagaaggaagtgtctattttactgagtacagtaaaatgaagttggtgatttattctcttctttgaatgaataagaaatattaaaccaaatggaaaaatgtgagaaaacaaaaataaatatatgaatcattgatataatgaagaaaatttggaaatctctgaactgatcagaagttaccatgaacaggtaggatctatcacagccaaaatagaaatataattttcaaagtcaacattaaatgaaggattacaactagagaagtttataagctgtaagattgcaaaaggattttctcacactgtgttcagaacattagaagtgtaggtgagatgtatagcatcctgaataatgctggccatccatctggaagcaaagagagctctaggagcaggatgtgtttctggtaatcatattctgaattaaacattttgagcaatcccagaggatttccctggtgaattttatcaaacatgaacaaaacaaatggaagaggaagaaatacactcatgtttcatcaaggcagaatcagaatgataatacaaaaggaaataatccctataaggatagctcttgtaagagactcaaagtatcttctcagaatccatgtcacatagatcacaatggcctggaactctagctccaaatggatctgtcacctttgtccttcatgatcatctgcacaaaagatgaacatagtcacacaaagatgcatgcatatacataagtataaattaggtaaatcttttcttaaaatcaaaaatattatctgtagacaaaagtttctgtcctgcccaggccttttctcagtgaggcattcttatcttgcttcctctgcatctggctctaactctgtccctgcctttactctttccagaattctcctaatttggtagccccatcatacttcctgcctggctactggcaaatcagcattttattcaaccaatacaagtgacaaatctttatagtaaacatgattccccccttttttttcttttcaaaacaagaatcctgaatataatctcctttgttaagctttttttttttcttgaccattattcataacaacttgtaaccaacacatttaacaaagacaaacatccataatccattttggggggaatgtgggcgtatttttctaggctacttcctgctgaattgtggcactggaaatcttatggggagtaaaagaaaatacagaattatggtcaagtcctgactggagtattctgtgagtctggatcatctcagttagccgccttgaacctggattcataactcataggaaactgcaacagaggttctctgaatcattggatcatctgggccacctgttcccattggagatttttcagggggtcttccttgaattaagccttgtttttcttaaccaagaatgaacacattgcttctcatttcctgtggaaaaaaatctaaacctcttcttcaaagtaacatatcttttcacttaaattttgaagtcaaggcatttttaaaatatatgggttagattaattctgcaacatttataatcaaatatctattggttgctccttcttcagcagtcaagcaattcaaagacaatacaataatattcagttatccaaaatatttacatgtgaaaagatgaaaaattgtgtaataaatgtgagaaaatcatttgacaaaattcaagttccacttttgattaaaaaacagtgaaataagcatagaaaaaaacttcattttaaatataaaatataaaataagtttccatgagatatgggataaaacagaagagttttctctcacaatttctatttatttatacaggaagttatacaaaataggaagtaagtgaaattcttggttatagatagaaagaagaaaagtgtctatatttaaagatagcaacagtgtgaaaaatcatcttcaaaattcagtatttatcaaacacagcaaagttattacataaagtttatggaaaaagtcattgccacttctatgtattagcaatgatgaattggacagtaaactaaaattataatattgttaattgtagaacaaatataaaatactccagtcaaaagacatgtgggatttatgcaattaaaactatgacatggtaccaagagaaacctttaaagcctaacgacataaaaatatattcacagattgagaaggctcaatatgttagaaggtgaattgtcatcaaatcgttctgtacattcaatggaatcctgatcaaaataccaacagaaaaccttctgtcaaatttgatatgattattctgaaattcactgggaaatatgaggaactagatcaattagggctaatcaatcctggacaaaagaatgatattggagttgtgccttcaagacttaccctgcagcagtagaaatcaagagagtatgatgtcagaaaagtagcacatacatttcagtgaaaaggaaagaccccaatactaaaaacacacatatactcaggtgtctacattttccttaataaatattttatttagaaacaatcattttacatatcaacccccattccctctccttccaatcctccattgccccctaccacacccccaacccacccatacccactcccaaaggacagtgaggccttccatggggtatcatcaaagtctgtcacatcatttgaggtagggcctaggctctccaccttgtatctgggctgaaacaatatccctccatagggaatgggctccagaagtccatttgtgcactggagataaatactgatttcactgttagaggttccataggctgcccaggtctcctaactggaacccacattcagagggtttggttcagtccaatgatggtttcccagatttactactggggtacctgtgctctcactaggtcaggccaattgattctgtaggtttctccaacatggtcttgactgctttgctcattcctcctcccttcattgtttagctgtggatgcctgcttctgcttccatcagctactggatgaagactctagggtggctattaaagcagtcatccatctcattataggggaagggtatcaaagatgctctctccaccattgcctagattcttagttagggtcatctttgtggatctctgaacatttccctaatgccagatttctatttaaacctatactggcttcctttattaaggcatctctattcttgctctcctctgttcctcccctgcatcagtctttctgatctctcttgttctcctccccctcctcttctccccttctcttttttcctacctccccccccactcccctccattcccagttatctcaggagttcttgtccctttcccctttttcgggggaacatgtatttttctcttagggtcatccttgtttcctactttctctggtggtgtggattgtaggctggtagtcttttgcattatgtctaatattcacatatgagtgaatagataccatgcttatatttgtgtgactgggttatctcactgaggatggtttcttccagttccatccatttgcctgcaaatttcaagatttaattgattttttccactgaatagtactccgttgtgtaaatgagccacatttgcattgagtttttctctatttagtttgatcttggctgttggtttgctgtatattgcttttattatgttaggtatgttcctgttatccctgatctctccaggacctttatcataaagggatgtttgattatctcaaaggctttttcagcatatagtgaggtgatcatgtgtttttttttcagtttgtttatatggtggattacattgatggattttcatatgttgaaccttctctgcatcactgggatgaagcctgcttgatcatggtggatgatttctctgatgtgttcttggattcgatttaccagtattttgttgagtatttttgcatcaatgttcatgtgagacaacggtctctagttctctttcttagttgtgactttgtatggcttgggtatgggaattgtagccttgcaaaaagagtttggcaatgaacctcctgcttctattgtgtggaatactttgagtagtattgatattcgctattctttgaatttctgctattctttgaatttctggtagaattctgcactgaaaccatctgaccttgggctttttttggtttaatttattgaaatgttattataaagaatttgaaacaaaataaaataacagaaaaacctacaatgtatagattttttagccagaatcaaaagtctatatatctcaataaacttctttatatttagactagccattatggagctgtgaagcttcacattggactttacactttcactatcaaatattttatgtacttatccgccaccaatatacaccaaaaaaatccatgacagattttaaactagaaaaagaaatgtctttatgtaatctttcatggttcaaattgtgtaaagggcaaaccacaagactgaattcatatcaaaagttgaagcatttttatttaaattaacacatattttaaattaatttatacaatagttatgtaatatatataattttgcaaaataaactatatgcattaacaatatgcatatgaaaatgtagtcattacatgtctcttaatcttattcaattttctttcaatctactttttcaaatacatagattatacataagtaattctcagaaataggttgaaaatcatgagaataaattatttcaaagagggttgaatcaatattcagatatttcagacattgagaattatacagttattagctttgatttcttaagttggtgttggaacttttgtcactcatataaaattgaagaaacaaaatgcatgattaaacttttaatatcaagctttaaaatctgtgtccaaaggggaaccataggttttcagcatctaatattgttagatgaagaaaaatgacaaacacacaaagaaaatgagactcttctttataagagacttagcagtaagctaatagtctttcactaaactttaagatgggtgaaatttcacaatagggaaagcaagcacattctgactagaagaagaagaagaagaagaagaagaagaagaagaagaagaagaagaagaagaagaagaagaagaagaagaagaagaagaaatgaatagttccaggactgcactgggaatgcccagcaacctcaaattctcaagatactgcccaagaatgcagccaaattagtgtgtatattctgctcaagggttgaagttaggaccaaaatggtagaaatttttttgtagaaatattcccacaatacaaatataatatgtatataatatatatgaatgatacagatatacaatatcaaatacaaaattaatgataagtgtataaaatagtaacactatgtttaagaattcagtacagaaagaaggaagagagtgaattatttagtcaggaatcaagagcaagtgaaaagaaaatctctcaatgatggatatatgtgtgcaaatgttcaatgaatatagtttacctgccttgtaaaccagagacttccttcagtagctagtcactatttatttcttttaatcttgcaagatatggcatatccatatcttctagagcactttttctgattcaaattcagtaaagacccagaatctgcattggtgagatgattctggcataatggaaagtaaaaacacagcactagatcaatttaggtcagaggacacccgcaaccatcatactgatgagtaaagcaggtctcagaataaactaacggttgacaatatgctgtagagttattgtaacttcaggaacattaaaaatctttatttactcttctctcttatattacatcctgaccacagtttcccacttcttcctctcctcacagtccctcatccctcttcccctttcttcccatctattcctcctctccttcagaaaagggcaggcctcccagggatatcaaccaaacttgacatataaaattgcagtaagatgaggcaccttccctaatattaagactcaacaagggaactgagtaggaggaaaagaatcccgaaagcaggcaaaacatcagacatagcaagtgttaggagccccacaagaagaccaaactacacaaccataatatgtttgctgagggcctaggtcagactcatgttgtctctctgatagatgatttgttctctgtcagtccctctgaggccaagttattgactttatgggttttctagtggtgtccttgacatttctgagtctcatatttattcctccctctcttccataggattcccagagctctattgtaggggatgctgtagccacacctgcttaggggctggctacaggtgtgcctgaccatgcctttgcaggcatggtcagggtgacatcaggaaggtttaatagtgagggactcttatgtggcagccctgcttttgctttcatctttggcttgctgtacttactgctgccccaccagctggctaggtcgctctgtaagtaaggcttttccctactaaattcctttgtatttttacctgaatctgtattggtaattcccatattatctggttgtcagaagcaggatcttgtaaacccaggccccaactgtgagagtctacaagtcccaccaggacggtggtctaggccaggaaagcgccctctctccacaggtactcctggcttgcagctgacctgctgcaccacaagcacgtccccgctgccactgagctcctcagaacagtccacccagctgggagagttctccagaccttccttgatacctaaaggatggccaatcatagtcattgatctgaaagattgtcttttcacaataccattaaggaaaatgataaaaaaaatttgcatttactgtaccaactcttaataattcacagccagttagaagactttggtggagggtttgccacaaagaatgctaaatagtcctactttgtgtcagcactttgtacagcaacctttgggaataatttgtaagaaattttcacaatctcttgtttatcattacatggatgatattcttttatcagattctaataaggaaactttggaatatatgtttgaaatggtgaagaaagttctgcctcattggtagttacagattgccccagaaaagaagaatgtctagccacacaggggagggtctaggccctgctccaaatgatatgacagactttatagatcccccatggaaagccttaccctccctggggagtagaaagtgattgggatggggggtcagtgggtggcaaaagaggagagaaggaagagggaactgggattgacatgtaaagcaagcttgtctctaatttaaaatataaatagtaaaaaatattatgtctctaataaaaaacatgcttaaaacaagacagaacaaatatgggctatgtatgaaccatgaactgcagactctgctgttgatattaatcatgtcccctagagtctattttcagttactccgaccctaaataaccattcagaaagtaccaactcacagtccagattttccacagctcatgaaggcactcttatatttttggccttatcacttagtgacatctgactcatttaaatgtgaacattaccatccttcccatcttctaatcagatcaattgcctatatgtgacaaagactaacatagatggtaaaaggcaggggcatcttttttttcttctcaaagagaagaaatgaaggaatatatgcttaactgtaaattaatgacttggtgtggacttaggtttgctatcatactaggtttataagaagagaattagggcaaatttcagatcaatgggggtacccatatgaaactaacaagcctttgaataaaattatgtgattttaggaaatattttactgtgagccaattttttcctcatgagcccactttcatgaatagaaacaaaaatgcaatcttgcttcagctcacttgcatgaatagaaacaaagatgcaatcttactgtaccattgttgacaggaatattgtaatgcaaattttttcaaaacagtattttcaacataacctacaaagtgatagaaaattatatgacaaaatctagtgctactattttattaataaagtgaaatatataactatgacaatgacctaaccatatttaaaactcacaattgaaagtgggttatatattctgtcaacaatggctaaaaacaaaaatcaaaggccagtttgcaccatggataagactgataccaaacttcattttgattttaaaaaaaaattaaagtttttatttttgttactatagttttcttattgtcaattgattgcttgcaagcctagattcattcaaattgatttcagagagtagttgatttgaataaatataaactataagcaagtgatacatgcgatttataacttttggagattttttcttttttggatacttctagtcactatctaatatcttttgctttatttgctatgatgatgggaaaacttaccctgtgggaaagtggtaacgtttaatctagaagctcagtagaaaattttatatttattaaaaagaaaaaaggacaaaaataaaggaaggaaggaagaaagaaaggaaggaaggaaggtaggaaggatggaaggaagaaagaaagaaaggaaggaagaaaagaggataaagatgagacccttggatgaatgtcatattaaggatttctgacatttagagatggagtcatgtgtaggaaatttctatttgaaggtacatttcatatgacagaaattactagttttaaaaaataccatttgaaatttaaatagtcttccatgccatgatgaaacttgttttttgtcttatagctaatggaattaatcaattactcctttttgggcttccaatatcactataatgatatcatgtccattatgagaagagaaacatttcactataatagtgacattaaataatatcactataacttaaacttgaataatttacatttatctatattattttgtcagtagaacaaaatagttcaaatatgcaatgaactaattcaaaaattagaataaaaaccaacttgacaacttttttcaaagcaatgatctgtattttaataaacacaaaaatagcataaaacagtatgatccaaatttattttgtggttatcagattagacccacaaatatgagaataattacgggccaagtgaattaaaaaataaagatggagatcacaatagggaaaatacaattatgtgttgtaggaagggctttaggacaatagaggaattttgaccatgtactggaaaattatttaccagtgaccacctagcttttaggagccatggaggatggaggctggatatgttggtgatatagttaatctaagcaattaggaggtggaggcagaacaggaggattaagagttcaaggccaggagctggagagagataggcctcaggactgtaggacacttgcttctcttccagagcagccaagtttggcttctagtaacgatgtcagggaacctatttagggatcctatgcctctggcacttgtacctcacataaacataactaaaacaatgaaaagtaagttttataagagtacaaggctagcaagttacagtcaaatattttttaaagtgacagaaaaaatgtagccaccatgagatgtcaagttgcaaaagtaacactcccctctttactgtaagcaacaacaaagcctggtctcctggtcatacacacaacacttagaccattaactgcaatcatctgtagcaaaggagatgctcttgggttgctttacgtccctgagtgaatccatgagcacagggcaaaaatgtacaaatctctctatggagaccagacccaactcatagcacttctgaggggcagggtactgttccatggtcatcttcctcaagctggctgtgtggtggagaaggtcactcaagacattcatggagaagtcattggtatagaaattgacctttgagttcttccagcagggagaaggacactgagctgagagtcccttatcccacacctctctaattccagagtctcaagagtgtctgctactttctctagtagaaccctgagaggaatcataaaaaaattaggcagtaggacctcactcatgtctggatgttttagctgacagaagcactgacactgggacaaatgattcaagtctaactgaaacagctggcagtgagtgacagaaaaggtttccaggcgattcttcgagttcctgagtaagtggctcatgtggccacggagaaaacagatgccattcatatagagatgcaggagactgctgattttggagaactgagataagcacattgggattaacctctttgtagtgtgatttatagatatgccaaaatccgatctggtggatacacactagagaaagtgtatgagagttctcatctgaataaaatcaggaggaaggcatgccagagctctcaaagtccggtctatggtgatttccaactcctcaaatttccctagctgcaaaacttactggaatagccagaaattatctagggacaattacacaatcttcatgttcaagcattggaagtctgctatcctctgagcctcctgaaggaagtacattttttcttcatcctgttggaacctagcgtagaggtcaattatcaccctcacacactgcctctgctcatatctgggagggggcttcaccacctgcttctcactcacagtctctgctgagcagctcctcaccttctgctctagactctgcagcccagatttcatggggcaccctctgaaaattgagtattcaaagattccccctcatagagtgatcatgaagtctcagcagcagcctcagtccttttgatcacagtcagaaagaagtccaggttgcagatgtccatcaggatccccacaggaaagtaggagaaaggccaggctgccaccatagccttcacaatcctctggatctgcaactgaaggcctcctggaacaatggtaagaagagcatcttgggcaggtcttccagagcagagatggccaaggcctcatttctcagcagcatctgccttgccagctcctccactgtgggtggtgtccaggctctcatattgttggaatttggaaacacaggcagatactggcgattgtgtttcttcttctagcagccaggcagtggtgctctgctcctccccaactttacaacttataaattaaaactttttaattttcataaattgttggagaaattaccaaagattaccagatgttttcatgtcattcctgttttcccatccatccatgcatctatgttgtattaataagctagtattaaccagtacactttatgagaagattgttgagtcacagtgtctcgatcagtggagtacctctgcctctgaagaccttagcaaccacctgctcctggcagcagacctgaaatcaagagaaattgttctacaatggaaacatgctgaaattctagagactggtcattttcacagtacaaacaaacagttcaatcttagctaaaaatcaaataacataaattgaggaagatacagaggatgtaagggaagtggaggatacataaacaagtgggagactgtgaaggagttggaattaatttatacatagggtaataccaagtctatgacgtaaaaaccaccatagttggagcaccacctcactagtggaaaagaaacagtgagggctaagatgatatgtacaagtattaaaaattgactgcaatggttaagtggctgcaatggtgatgcttttatttttaaactggggcaactttgaatgataaagaaagctccttctaacacacaaaagtaggacatcattcaattctgagattcatgaagaagggttttaggggtgcttctgctttggaagccaaaaccatgcccagatgaataagaaacgcatgacatggagaacacagacagcatggcagcagacatcccctaggtagtatgttaaactagactggagcatgtagtctaccactgtacagcctagtcttgaatttaaactccactcttgatcctcgtgtgaatttgaacaagttgttaaacttctctgagtttcatatttctcacatacgtcataaagtttttatctgtatctgccacacaaaaacactgtggggaccaaataacgaatctgacagaccactgcttcagtgcctatcacaatgttaagcagaaattatttttaaaagttcagcagaataaagataccaaacatcaaatttcatgataagccatataagcacagaactaaaatttaagaaaaaaatcaccgaattttaagctataatccatattgcttaaatggatatgcaaaattttcataggcaatgaagatccaaaacaatttgtctttcagctctcatatctacttaaaaattggggggttaaagaggaacaagaaatggcaatccattttcatctcacagcctaaatactctaacgtctaattttaaactggtatattaaagtggcaattatttggcatgaaatatgattcatatgcttgatctattactcaacttcaactcataactattgggtgattttattacaagtatgaaaatataggacagtgacagatgactaactgctctgattttcatctgaatgtataaaataatttgacaaaaatgagcacaatgagaataaagtgttcatcaaaataaggaagtatgtaatatgtattccatgattcatgcacatcaaattatccttgacagaagaaccttgcatttgttatatttttcctgtaccaaagagattattcaattttggcatctttcatcttaaaaataataactaccagatatttgaagaatttaagggatatggttggggtcggcattccctcaatgatcatagactttatcattctgcccattaagtaataatgtgattggataaacccgaagttaacaatcactagaaatataccttatttaaaagacaccctattcagattacaaactaatgtaatggattcctttttatagaatgtatgtagcttttatatagaatttattatagatttatataaaatccatataatagaaagtaacgttagtaaagaatgtgctttcttagttagatttatcagtggttcacatgtgtaaccagttcttccaaaactttgctttaaagatgtaatgaactctagtgaaacttttttcttacttggaagctcaatctttattcagagtggattagtcagcatttaaatttatcacaagatcaaaaatgattggtagcctgtcttagaaaagaactccatgaaattcacagttctttatcacaggcaagactggtggtgagtggactgcaaggctctgaggatgttatgttgtagtgaaaatgtcccgaaatggttgtttttccttagatgttgtacaatctgatgcaactcaggagcaagtccccttgagtgaagaattcttccccaagaaacaaacagcagcatgtgaatggtttgccactttcttattatctgcattctcttgaaaggttagcttcacaaagtgtgaatccaagtgtcctttgtctacaagattttctaaaaaaaacttttgaaaccaaaagctgaaaaactcagtgctgagtttcaagtttgaatgaaatgaatacaccagagatagagtttagtaagtgaaattgccatttttctatgattgtgtttgtatgctcccaggatagatctaaaaatgaattagctttgagtgtacatattgcaaacctcagagatacaagaataatcaaagtcataatgatatcttaatgccttgcctgcttggaactctgctctgcttctgggaatataactgatagatgtattgaagtagttcagacttgttctgttatgcattgtagtaaaaagtcaaagtgacctctaaaatatttgttttctcttccaaaacacaaatggaaaaaaacttgcatagctcatctttacaatatagttaagctcaagaaattttctgatatttttaagttcatgtttttctctataagacacaaaataatggtgcttgtgttaataaactatccacaacccagacaaactgctcaagttctttacaaaatattaacaatggtgattccaaacataaatgcctgcttagttgccctctcattggttctttagaaaaagtgaagttctaaactgtaggttgcctaaatatcaaccttcctctttgcaagcgaatcctctgatttcagaaaaaaaattatgcttctttccaaactaagatttcatattttcactaatgttcatgttcaattttttgttttcttctgttatgtatttttaacataagattttaatattcttaccattaaaatatgtattaattattcagcccggcgttggtggcgcacacctttaatcccagcactcaggaggcagatgcaggcagatctatgtgagttcgaggccagcctggtatccagagcaagtgccaggataggctccaaaagctacacaaagaaaccctgtctcgaaaaaaaaaagtattaattattcatatttattcattatatatacatggatttctgagtttatgtgcaccacatgtgtgcaggtgcccagccaagtcaaaggatttatgatcctctaagactactggtagtgacagtggtgggctgcttgatgtgggtgacagaaatcaaattcaaatcttctgtgaacagaggtgactatttttaattgctgaaccatctctcaagccctgtatgatcattttttattggaaaatggggaaccttgaacttttactctgtgcacatttttaaacagaattgcttatataatgaaaaataagccaaattgtttagatgtggttttttcaaggtcaaactgattcattcttgccatctatatttatgatttgaaattaagaatggcctctcatccgggctctctttatttgagggatattacttccatctttccttagtctttattctgcagctgatggttcacctacatagagctcaggcactagtagcattttatccaagatgatgatatgtgtaaatatatgctctgtaactttgcgggatatttagccatttactttcactagattcatgtggcattgtcccgactctgacaaacaaaaaatattttcagtcattcattgacaaatgctaggggatacagttatccctgccatagatttatgagtgtgctccaaacatcactcatttaaaagaagctctgaagattagcaagttttaaaaaaagtattatgctacatttaagatgagaatattaagtcttaagagtttctgaaaatgtagaaacaagtttcataagcaaaagtaagtggaggaattactgacctggaattatttcaagcaaaaataaattaataatggattgtgtttaactgcaattaaagaacagatgaaacagaacaagatgaaaaaaagacaataaacaagaccataagcctaagaaagcagtatgacatccatgttatactccactcaccagcagcatgcatccctaaagagcacatagaatatccgtcaacatgaactacatgctacacatcaagacaaatctattccatgcaaaataaataatataagatcgctaaccacaaggaaatgaatttgctatagaaaatgataacaggaaaaaactgagaaaataataaatatgtggaaattgaacaatgtataaaacagcaagtaaaagaacatgaaaaataaaaatgctttgaggttagaaaattgaaaaggaaaaatacaaaataacaagatctggaactaaagcataggttaggtagaaatctctggctgtgtctatatctccattcctacacatagttaacaatggacacatggcagattaatcttgaatcaagatataaaagcaaagaaaaacaactgaaaagatacaaaacagcaaggttgttaatacaattaaaatttattaaattttaattagataaacacatacacacatttgatagaaatatagggagttaatgtaactaggatcataaataaccaggatcacaaatcaggatgacattgcatgagatgatttatgttgattgttgatttgattgcattgagaaccttaatattagtgagtgagtcagacctctgggtgtgtctataaggatgcttcacagactattatatcataaggtctctgagtgaatgaatggcattatttgaaataaaggaaaatatacttaccaattggagtggttcattagaagataagccctggaggcctgtaccctgcaatggcctttcttacattccctttgttctttttcctgtgtgccttgatgtgaacttcgactcttcacaccagcacagcattgtgagtgacacctctaaactcagattaaaagaaatcttacttcccttaagttgtgtcccttgggcatctggtaaaagtctaacacatcactactgatctataaatacaatagatcatcaatagtttacagaaacaattgaaaggtaagtaataacataacttagatgatacttgaaaattcttggaaaagagggatttattaaaactaatgtaggaaaaatagactcccaaaatgaactcacagtaaacaataagaacatatcaaactcaaatgatatacttgaaaacaaactattttgagaattaatactaattgttcacaaactgtcatattgatattgtagaaacactggcaccaaagctagaggtagtctgggagtaaaaacccttcatgtaacattatcaaacagaatccagaaacataggtatagaattctaaatcagaaccatgtaatatttatcccttttcttcaaagttatattaatattccaaaggtagtaaatgtaacgtgtcacaccacctatagaacagaagagaaaaatcaggcaggtatatcagtacctgcatacaaaacaagaagaatccacacactccatttcataaaaatgtttagcaagctaagcataggaagaaatttccgaatgaggaacatctacaaataactcacaagaaatctatgcttcatggtgaaagactatgttttcccctggggctagaaacaattcacagatacattttctatttgtctaaaaatgtccctaggaaatcaatgatatacacagtaaatacacatggttaaaaaaaaaaagtacagaatttacatatgaaagctgtgaaatactgtttgaaaaattaaagaagttttaaatgaaaaagtaactattacatcttcacctacaaagacagcagtgtcgggatgttgatgcacccaaactgacttagaaattcataagaatttgtgtctgaattccagatgacatctttatataaattagagagctaatgtccaaagtcatgtaattatgatagatcacacataccaaaacagtcttaaaatagaagaataacatttaagacttacacttccaatttagcaaaaattggaaaaagtgatagaaagcaatgctaatcaagacagtgtggcactgataaagcgtgtgtgtgtgtgtgtgtgtgtgtgtgtgtgtgtgtgtgtgtgtgtgtgtgtgcgcgcgcgtgcgtgcgtgcgtgcgtgcgtgcgtgcgtgcgtgcgtgtgtgtgtgagagagagagagagagagagagagagagagagagagagagagagggagagaggggagaaagagagattatattttgttcatatttatcaagggttacatatagtgggctaagttaaacatattaattactattgataatgctaatactaaaacatacacaaacctttgtatgtaaattttgtgaggacttgtcctacttctttttcatcaatgtgatgtgaaataagatttcaatgcattagatttctactgatgctgtaacaaattggtacacacagttgtttaaagtaatgaatattttttcatctttacagctggcaaggcatctcactgggctaacctcaaggtcatggcagaactgttctcccttatgaaggctgattttcttccttgtgcaggttttagagcctgtttgcattgctttctcattgttccttttctcctccaaacaagcaattgcttttgattctctagtacatcaagatgccctcactccaacttctctgccttcctgttctccacttaaagaacccttttgattgcgttaagcccaactttttctggattctgtttgataatattacatgagggttttttacctccacactacctcaagctttggtgccaacttttttttcacaaaaatcttttaaatgcctcttattccataactattattgttatacatttgtaagcatgaattactaagtacaacctagtggttcaagtatttagtgttgcaagtatgtatgtgtttagggatgacaagttaggaattaatctcccctactaggggactttgtccctggataaaactaattctctctctcagcagcaataattgtttagagctcttcacctggggtggggccttgtaagtgtttcccgaaccacactgatataccaattagtggtgtcatattttaggtctcctttagacaaccatattgttgagagtacttgggtgaagcttctgcatcatacacaaaaactactatctttcagcagatgttctaatactcaggcttgtaaaatctttctgcccctccttcaactgtagatgaaccaagaaacccccctaagaagatctaatttgcaaccttagttccatctgtaacaataaaaccttcttcccatctcaagtaatatacttgacaattgtgggtaagtacagagacatttctagacaattgatattttggatgtaatagctggcaaatgaagaataagtcttttaagaagcctgtgtctgatggaggcaaggagaatatagcatattagctaaagccgcaaagaagtccatggcaatagccttgtgtgcacactgcggaaggaaaagagaatgagcagcaatgagttttctgaggtaggtggagcacaggatatatacaaactgcaagcaagtgacaaattctgaaataagaagaaaaaccctagtgtatcttgataaacttctgtaggtttactggagaataaattaaagtttattaattaaggttcttctctcaaagcttttctgtggggaaagggggaaatcatctcctaaaaagcaggtacacatggtgtctttgggtatttgggaagactgacaaaaaaaacgggtcaataggattctgaattttagacactggaaatatgacctaataatgtttatgacctatttgagcagaggtcaaaggtgcactgcatattcatccatgtggctttgcaattttcacaggcaaatggaggaggttctttttttatacaataatttatttgaactagaaacaagattgttttacatgtcaatcccagctcccacttccacccctcctcccctaccacccccccaaactaatatcctacctatcacatatcctttctgctccccagggaggatgaggccttcaataaggggtcatcagagtctatcgtatcccactccagtggacttagctcagggagctaaggcccactccagtgtgtcttagctcagggagtatccctctgtgtggaatgggctcccaaagtccacacctatgctagggataagtactgaaatactacaggaggtcctgtagattcccgaggtctcctcactgaaacccacattcctggggtctggatcagtcccatgctggtatcccagctatcagtctggggaccaagagctccccgttgttcagttcagctgtttctgtgggtttcactcaacctttttgctccctcatgtcctcctcaccctgcctcttctctcctccttattctcctagctccctccccctcttcccgtgctcccaatttgctcagcagatcttgaccctctccccttctccaggggaccatgtatgtctctcttagagtcctccttgtatattagcttctgtagcagtgtggattgtaggctggtaatcctttactctatgtctacaatccacatatgagtgagtacataccatttttgtctttttttgattaccttgctcagaatgggttccttgctcagaatgggttcctctagttccatctatttgcctgcaaatttcaaggttccactctgtgtgtgtgtgtgtgtgtgtgtgtgtgtgtgtgtgtgtgtgtgtgtgtgtgtgtttatgctgaatagtactccattgtgtaaatgtgccacattttctctatccattcttcagttgagggcatctaggttgcttccaggttctggctattacaaatagtgctgctatgaacatcattgaacagatgtccttcttgtatgaatgtgcatcttttgggtatatgcctaagagtggaatcgctgaatcttgtggtagattgattcccattttcctgaggagtcgccatactgatttccaaagtggctgtacaagttgacaccctcaccagcagtggaggagtgttccccttcctccacatcctctccagcataaaccatcattggtgtttttgatttttagttagaaacatgcacacttggtacttggtttgattgagaagttcatgcacacatacctcccttggaggcctgatcttttcaaatggaaaatggaggagagtggatctggaggagagcagaggtggaggggagcactgggaggagtggagggaagggaaactggtcaggatgtaatgacaagtaaacaaataaaaaataaatttaaaaacaaaaatgagtgttcctcctccagcaattatctattgcaaacattttctctgtaaggagtagaaccagcaattattcacccggtctatgccagaagtagcttggttttgtgtatgtcttatatgggtagccacactcctgcaaattcgtaattgtattaatgtcatgtccagaggacagcatctcacagcgctctcttcctatcctgcagctattgcattctctcctcttcttttgaattcatgggaaatagtaagataagaattactattcagagttgaacactcagtctcttattcacaatgctctggcctttttactgactgctgtggcctacatgaagaagcttctccaccaaaacttgagagcaactcaggtcaatgaatatacacatacatatttagagtgtagattgacaagaccactaagcaaaataacaatggcaagttatgccctaggacctgtgaccttcttagccccaaacttttcaccaggattccagtacaaacattaaattacttcctgtggaatatgcctcaactctaatcataacatattagtcatcttttaaatttcgagtactgtgaaagctagctggtggataggaagttccttgttcagtttgtgattgatttctctatgtcctgcagccaaagtgtgtgatgtcttcagcaaaaatgcctcaacatgttgctattatgggtatccaatggcaaaaatatagcttgagttgttaggtgctaaagtcagagtcctggaaaaaggagtaatggtagacagagacacaagactctgggttcacttcaataatgaagaatttttatttttcttactgctgtttaggtattgtttagctagcaactagagatagcactgcaagctagaagagtttgattaaagagtatctttgattcattcgtctgaggttttcattctgtatttccctgcctgagggcttgtttttacccaggaggacattcctcctaggatttatctcattcctggagttttccacagtcatggagccacatttgggttaggatttgtgactgagaaaggaactacagagcatctggacccaatagttctggagacttctgacttctgaggacttcctcagcaataatttataaggactcaccatcaataactgtgttttcctttaatgccctatgtcttctgggagtgacattgtccactgaaatgcaatgtagactgcatcttctttgggccaccaccacatacacacacacacacacacacacacacacacaccaccaccaccaccaccaccaccaccaacaccaaaaaaaaaaaaaaaaaaaaaaatggaggcctatagcttaggcttgtccatctacctcttgtaacttaaattaatccattttattacctacataaatacctacatgctgccacataactcatggtttttacctctccacatgcgtgtcttgttccctctgtctgcatccagatggtaactctgtctttcttcttcccggagctctctctgtccagaaatcccagctataactcaactcttcttacctaactattggccattccattctttattaagccaatcatagtgatgcatctttacacagtgtaagggaatattccacaacaatgcaagggaggcaattctgtttgaatgtgcctttaaagttgtattttgaattatcttactaaatagtgagctaccataggcttttacatacatcataagtttttgttaacccacctataaaaccatgctcttccccaatcacctcccccatatttgcttaatcctttaaccctcagtattttccccttttatttcttctcatgtgttttgctatctctctacttattttcattttaagttgtgttgtgcagtattaggcttccatgtagattttcacatatactttattgggttagcctccctctttattcattgatttcccccatgctccacacctctgaatgtgcaagtccatcctcataaatctgcctcactcctttcctttcatctgtaatctactcttcctcctcctttgacatgcttttacccacaaaactggcttctttctaatcctccagcttctttttgtgctcaaagttaaacaaaatgcaaaaatgtttgaagctgaaatctacttataagggagaacacgttgctttttctggttctgaattactacacacagtacagtttttctggttctatcaatttaattgcaaatttcatgtatttatttttcttcatacctgagtattattccattgtgtatatatgccacatttttcttagccactcataatttgggagttgggttccataattccttagacatacacattcaacaagtgttctgatgtgtgtgtgtgtctgtgtgtgtgtgtgtgtgtgtgtgtgtgtgtgtgtgtgtgttatgagaataacattcagtcccaacaagatatcttaattgttttctgaaatgaaaaaatatgaattcttgatcatgtataaatggcctaagaaatccaatatggttctcagtgttgagtactgaagaaataaaacaggattctccactaacagccatcccagctatggctcaccagcaacttgcacataagaaaatatctatgcagctatcagacacatgaataactgacaatgatgttaatgtaaagtattaaggagtatccttcagaatgaggagcttcaacaataatcaccttttaattcataaaatcaaaaattatagaagctgggaaggcccttggaaggcatccattactggttgcatagatccccacatactctttgctggcttaactgtaatgagagctttctttcctggctggtaccatggcccttgagccccaaataaacacacagatgctatattagttataaagctgttggccaatgactaggacttcttattggctagccctatcttaattattaacccatttctattaacctaagtatttctacatggccttatcttaccagagaacacctggtgctatgcttcctgtctctcgttgcaactccatctgcctcatttccagaattctcctcatctcctagtcctgcctatcttcctgccttattggtggacagtgttttattcatcaaccaataaaagaaaaatgtattcagaaggaaatcccccatcacttcacagtgatcactcacatctagactgaggtcatctcacagtccctgccaccactcacataatacttcaagaatcaagaagccattgcctctgtttccatttgtttacttcttttaaaatacaattactataaacatctttttacttttgctgtattaattttacttctgggacatatgattttctctgatttttataaaattttaattgacaaatgttaattttatactcctgtggttgtcttagtccattttgtctgactataatagaatgtctgagtctaagtaataaaatataaaatattaggacttgctttgcttcacctttagctgtttgactagctatgatgcatgtgtagtactaaggattgcaatgggatcacatgtgttgctaagcacatattctaccactggcatatataatccatttggcaattgtcatgattactgttgttaagataataaaaagaattaacctatacaacacagagttattgtttaaataacatttgttaacataatacatgggagatgaaggagataaaattgtttcacagcaatagactatatggattttgttcaggagtgtcaagaaacatcaacataggtccacctgtacatttcaaatcttactaaaaacttgacatgatgagaaacttggtgtggatacttccatttaaaaagctgagagctggtggaggtcctgaggagagagaatggatgatgtatgctagaagtgtcagaagtggagaagtcagctttgattctgttatgattctacagaggaccagttaggcagaccagggttaaagcaatcatcttgctcctgtttgcacgagcaggctccttttgcagatgcatcatattagtttgcataaattacttcatcctagttacatagtaacatcttggctccacagctggctttgctgctgctggaagatgttatggattaaactgtcttttggccaggtattaatagagctctcctcagcacccacaagtgattaatgagatgagaagataaaatgacccacctgctccaacagcccacaaacagaattaatgggagagagagagataaagagagagagaaagagagagagagagagagagagagagagagagagagagagagagagagagaggatttctggcagcagctttggtgcactctttaaagtagatcagtttgctgctcatttgtcttagactttgtgtgtgtgtgtgtgtgtgtgtgtgtgtgtgtgtgtgtgtgtgtgtgtttctgtagactctttgagtcttgagttaatttatttttagatacaattgttcttactttaaaacattcttttcattttacataccaatcccagttcccaccctctcctgtcctcccccatttcccaccttcccccaccccaccccatccactcctcaaagagggtaaggcttctcacgtggagtcaggaccaagcccccctatatttaggccaatcaaggtatccctccaaagagaataggatccaaaaagtcaattctagcactagggataaatcctggtcccactgccattggcttcatagactgcccaagccacacaactgtcacccacattcaggttccccagctgtaaatctagagtcagtgagctcctccgagctcaggtcagctgtctctgtgggcctcatcaaaatgatcttgacccctttgctcaaattatcactcctccctttcttctactggactctgggagttcagcccagtgctgagccatggatctcagcataccaaaagagatacacagattcgatgcatttcccatcaaaatctcaacacaagtcttcacaaaccttgaaagaacaatactcaacttcatatggaaaaatgaaaaccccacaatagccaaaacaatcctgtacaacaaaggaacttccagagtcatcaccatcccatacttcaattcaagctctgctatagagctatagtaaagaaaacagcttggtattatcacaaaaacagacaggtagaccaacaaaatcgaatcaagaccctgatattaatccacacacctatgaacacctaattttatttttacaaagaagctaaaattatacaatggaaaaaagaaagtatcttcaacaaatggtactggcataactggatatcaacatgtaaaagagtacaaatagatccatatactcagcataaatccagccacactgaacctcttagaagagaaagtagttggtaagctggaatgaattggtacaggagactgcttcctaaacataacaccactagcacagacactaagattgacaattaataaatgggaccccctgaaactatgaggcttctgtaaggcaaaggacccagtcaataagacaaaagagcagcctatagaatggaaaaatatcttcaccaaccccacatttgacagagtactgatattgaaaatatacaaagaactcaagaaactaaacatcaaaataccaaataatccaattttaaaatggggtactgatataaacagagaattctcaacaaaagaatctcaagtggtggaaagacacttaaggaattgctcaaaatccttagccatcaggaagtgcaaatcaaaaccactctgagataccatcttacattagtcagaatggctaagatcaaaaacaccaatgatagtttggcttagatttaatgatgctgtttgcaaagttggtgccttcatattgccaggccttcagcaaccaatttaaaagaaattacttgcccctgcaatcattttcatatacaccaagaaattcacctgacaaaaattctaatctttgaaggcacaaaagtcttatcctcaactacaccatagttatgcaaagtaaactcacactatatttttttaaagaaaggttttcttgatgcagatcatggacaagtcatattaggtagtatgtagtaacattatgtttacttggtgcttgctttgtttttgtttttgttttttattactcccaaaagaaggtgaccaggacaacaagaatactcacagctctgaatcaataaatgagcatagcccaaacaaaaactatgttttcatgtttcatgttcaaggatagaatgcatgttttcccatgtatgttaactcagaatgtctccctctgactctggtacacaaactccattctacttttgcttctgttgtgataaaccccatgaccataaccaacttgagaagaaagtgtgtgttttatctcacaattcccagcatatcatcaaccaacaacaaggcaggaacttaagacaaaagcatgaggaagaagtcatgatagaaatactgcttattgctttttagttcctactgatgttcagccagcactcttatacaatggagaattaggggtggcactgcccaaaaggactagctcttcctccattaattaccaatcaaaaattttccctgaagataatgtcagtaggtcaatgtgatggaagtaaatccccagttgaggttcctcttcccaagaacaagaagttcacaaccaggaatcatcatcacaaactgtgttctaagatgatgaacttttgattgctccaattgtaaaatataggacaatgttcaaaagtgggtgaggtcatttccttagaaatgcctctccctcctcctctcattatgcacagtcaccactatgagcattgtgaccagatggggaacagtaaagataaggataaaagagtactacatgaagactgaaccaaagtcacatatttcatgacagttctagcagaggtccacttcagaggtgctttttgttgttttcttgcctaatcagacctgttctgaggtgagcagcaactttgtagcaaagtgtttctctcccttttattctctacatgattcttagcacctaagaaacactggaatactttgtatgtgacattttgatttccatttatactatgccgtacacttgcacctgtgttctttggtatgtgtggtgattactgtgtgtgtgtgtgtgtgtgtgtgtgtgtgtgtgtgtgtgtgtgtgtgtgtaagagagagagggagagacagcgacagagacagggacagagagatagacacagacacagaatttccaaaggagagattttatatgtgggtcatctctctctacagtcatcttgagataaccaaaatcttatctatactattaatacttgcattttactaaagttgagtaagatggaaagtcagtgttacattttaatgtttaagggctggggaaaatacttagtatgagcaaagtatgaaaaattattttggcccaatgtggtttccttcagtcaataaaaacttaataatatctaaggtgatgtgtcagaacccaagttaagatagatgaattgtaaacatttccttgaaatccaacacctttggcaaagattcaacaaagacctttcttctaattagtttctttaaacttaataatacagccagctcgatttttatgatttttaaaggatataaaggattcatggaggctaaagcacatatttcaattataaaaataaaacaaaatggatgaatcctcagctatatttcattctttttgtcagtatactacatctctttttattgaaaatagattcttctctcatacaatacctctcaagcagtttctcctcaatccattcctcccaatttctctccaccgccactctctcccagatccacagcctctctatttcttaataggaattatgtcctttactaaatccacactagagaaaacatttttcaaaatactcaactacaaagtatattaaactgcttcaagtctaatctcaaagcaaaatattcaccatgatcaatttcgcaattgcacgtgtgtgtgtgtgtgtgtgtgtgtgtgtgtgtgtgtgtgtgtgtgtacaatgtatttcacatgtattgctctttgattagcaaatagtatctgcagtggtatttctatttgtgtgcttaaataaataggtttggacaactaagtatctccccaaaaggaaaaccatggaaaagttgtctagttaactacacaaacaagaaggaataaataatgctccactatggacatgtaaaattgtaaaaacgtagctcgttcactattttaccatcttctaatagagtaggagatcattcttctaggacaatagcataggatttctgagacatactcccctggacattcagcattgttactattagctcagtcaagcccactgttttctttgttcctgtatgtatttaccagtactgagtcatatctgaatttgatatagctcaactgtattggaatattgtacaaaaatggcttataaaactcatggctgctattgctatggataaggaattgcgggtataagtctccctcctgccatatctactttgtgtgaaaacccagagaaattgctgtttctagtacagaagaaagctgtgccactgagcaactaacttttgtatttttaaaaaaaaaaatgtttttattcccaaaaaaattgctttgaatccagcactcagaactaaatcctggctatgtagtgtagggtcttgcagtctgtatttagtgtatcttaatctgttcttccacataaataaatagtttggagacaaaaaatctaaaaattagtaactaaaacgaaaggtgttaggtttgaaacagttgagatacctccactattgctaaagatgccatgtgcttgaggcatagaaagtgcagaaatcaaactattactcaacctggaggtttcagccctgtggattgcttttcatagtacaggaaggttctatgcacactatcaagggagagcattaataataattgtacaaagctgtgaatcctgtccctaccataatgactggcctatagtcagatttttccttgtcccatcagccaaataaacaataatgagacttcttatcatgaaaggttggttgatgtagcttaggcttgtttctaactagttcttataacttttaaaattttaattttaattggaaagaaaattatttttcatgccaatcccaggtccctttccctcccctcctcccctgaccccacaactagcaccctacctaacccaaatcctttctgctcccaagggagggtgaggccttccatagggggtcttcaatgtctgtcttagtcttagggatagggcctaggccaacccccttgtgtctaggttcagtgggtaaccctccatgtgggatgggctcccaacatccattcctatgctagggataagtactgatccacaagaggtcccacagatttccaatgtctcctcactgacacccacattcagggggtctggatcagtcccatgcttgtttcccaggtataactttttaaatttttttatgtaaattctttaattactactcatatttacatatccaccccccattccctcaccttcccatcctcccatgctccccaccaaccccccaacccatcccccaactcctccccagggatagtgaggccctccaccaggaaccttcaaagtctgtcatagcgtttatgggagggcctaggccctccttgctgtatctgggctgcaatagtatccctccatagggaatgggctcccaaagtccatttgtgctctagggttaaagactggctccacttttagaggtcccatcttggcctcctagctggctcccacattcagagggctatgcaatcttctcttgtggtcctccttatttcctagctgctctggcagtgtggactatagactggtaatcctttgctctatgtctaaaaatcatatatgagtgagtacataccatgtttatctttttgtgactgggttacctcactcaggatggtttcttctagttccacacatttgcctgggaatttcaagattccattgtttttttttttttctgctgaatagtactccattgtgtaaatgtaccacattttctctatccattcttcagttgaggggcatctaggttgcttccatgttctggatattacaaataatgctgctatgaacatggttgaacatatgtccttattgtttgaatgtgtattctttggatatatgcctaagagagaaattgctgggtcttgaggcagactgattcctgttttcctgaaaagccacaatactgatttccaaagtggttgtacaattttgtactcccaccagcagtggagtagtgttcctctttctccacatcctcttcagcatagattgtcattggtgttattgattttagccattctgttaggagtaagatagtatctcagagtggttttgagctgaatttccctgacagctaaggatgttgattttctcaagtgtctttcagccattttagctcttataacttaaattaacccatttctattaatttacatgcttctccatggctcattgcttgttaactcatcttctacatgccatgcttcctccatgtcctcttagaactctgcattctttctcccagtgttccctgtgcctggaaatcctggctagctattggtcattcagttttttattaaaccaatatgagtgacacatctctacagtgtacaaaaagattattttacatttaacccttttgtctaaattaaaaaggaaagattttaactctaacatactaaaagtatatgcaattaagaacatttatcaggtattgtctaaatagaaaggaaacctattaactttaacaaatgaaactatatacaataggatcaattattaagtaaggattacttttacagtgtctagtgcattaatatttggcaactttagagaaaatactccattatctatcgttccttggtgactccaaagttttgtatctaatttagtttctatcatgactaaagaaaatggttactgtaactatctagtcttcaactctttcagatacctgagaaggataaaatgttaccagagtaaacagaaagtgcagagcaagcaacttccaaaactacaaaacaacagagacatctggctgtcttaccagttaccccaaatttcctctgcaatattggggcatctatcttcagcctatggacctagaatatttggcggacttttctgtgaagtgggaatttttgaaggatttttctaccctgtcttagaaaagtttggcagttgctttcttttatgccctgcttgtccagtttggatagcatacggtcaacagttgaaccaagggcaatttcttgcccaaatgggcagcttccaatttcatgtggaggctcttcaatgtccttcatccttttatacagtagattggtgctgccaggagcagacatgtacctctgtcaggaaaagccctatattattaaaacattaaaatgctatattctatttgtctctgaagtgttttaagacaaactatctatttaaaatatgcctctggttgaccttgaaaatatacctaaaattactataaaatgactaccaacctatatttatttattactctaaatagctttcaaagactagaactttatattacatttataaatgagctgcataggtaaaatgcttaaacaagaaatagaaatatataatacagtgtatcaaaaataatttatgtcattatacaaaaatccataccaatgtaaaatatttgagactagcagtagggtttctttgtttgtttgtttgtttgtttgtttgtttgaaagtagatacagtaatctacccctttatcctatcttttctgaggaaattgtaacagaggcactctgagaggctgggccatctgttttcataggtgtttcattcccttgctgggaaagcacacaaactttcaaaaataacatatatatctgcattaacacagtatagactgtgcattgtacataagtcaaccaaagatgggttttttgtttgttttaagtttgagcaagtaaaatatacatcaactgtcttgtgttttttttaggtatatttctttatgtctgtagccaggattttcagggtctcccccaaacaaatctgacctctatcctgaatgaatccacagcctttcattttctgtggaaacaaaagaataactttttctccaatgtaacatatttttgacatccattttgaagtttgacatccatttttaagacattttaaaatatataggtgggattagtttagtagtttttttgtttttgttgttgttatgttttttttttctttctctgtacaccaggctggccttgaactcatagagatctgcctgcctctgccttctgagtgcatgggagtaaagatgtgcaccaccaccacccagcttagattagtagtttatttttgttgttgttgttgcttgtttgtttttaatacaatgtctctcagaagctattgtttgctcatcaaccaacaaaaaatttaaagtcaaaacaacacaatacaggatccagactccctgtgatttcccatctctacatgggttatttttttattattttacttttctctttaaagacttcatcttgatatttttaaactattatttttggtgactgtctatatcctttttctttttctttttcctagcctactcacattgttaaacacattgtaacctgtttaggggttctttctgtctcgatctgtctactaagctttgcaacattttctgatggtgtgagacaaatctaaaactgctatgtcagctgctggcatggctcaacttagtgcatggttctggcacacaacactggcacatggtgctggtgatggctccagtccacaggcagcagctggtagccacacctctgtatgctgccaatcaccaagagattgtatgaggaggaagctacatttggctgtctagaacttttttttttctttctcaggccctatgtttggatgtttgagttcccacatggacaacatttctaactattttgttagggccattggctccccaataatgacatagagacttactaataattattaaagctcagttgatagcttaagcttgtttctaactagctgttataacttaaaatgaatcatttctattaatttattgcacacggatcatgacttgttatctcatctcctacatgtttcctcagagtcttatcaaaaccccaccttcttcttcccagcattccctgtgccttgaaatcctgcctagctattggccattcagctttttattaaggcaatccaaatgacacaacctcacagtgtgcaaaaaagattgttccacaacactgacctgacaagatgtgaccaggtacaacacaacagtaggttcaacagtagcattagtgatatggaagtaatcagtgagtttctgattggattaacatcctgttacacaaaatgaaacccattcccagcaccattacacggccaacaaaccatggctaggcaggtcataactcctagagtagacccgactactattattctgctaaatggacgtggtattaaaccaattactaatggcttgtcatcaaacccataggttaacacatctcttatccctcatcagaaaaatttctatgtgtagtatgcattagggttaattttgctgtgatgaaataacatgactaaagcaacttggaggagtaaagggtttactcaacttacactcccatgatttaaagaagtcagctgagaaactcaaacagggcaggaacctggaagcaggagctgatgcagaggccatggaggggtgctgcttactgccttgctccccattacttgctcagcctactttcttatagaacctgggaccaccagcccaggaatgttatcacccaccatgggccgggccatcctccatcaaccactaattaagaaaatgctctccagctgaatcttatggaggcattttctctaaactgaggttccctactttcagatgactctaatctttatcaacttgacatgaaactagtaaggacacaggagatggtgattaacataccagcccacaactggtatggaatcctcaaccccaaatgggagaactttggtgtaccctgtcttacatttctatcactatgctaaacgccatgaccaaaagcaactggagaaaaaggaatttattcattcttacaactttcagatcacacttcatccctgaaagaagtctggaaaggaactcaccttgctaataacataggaacttaaaccaaagccaaagagaaatgctatgtagaaggtttctcctcatgtcttactcagactgctttgttttttataataacttgtctatgttttcaaattataatatagttatatgatttctccccttgctttacatcctgtaaatcctcccttgttctccattcttgttctctcaaattcatggtcttttttctttaattggatgtgtgtgtatgtttccaattaatatatatatatatatatacatatatctatatatatgtatatatatatatatatatatatatatttcagtccacataattacttgttggtgtgtgatttattggtattggataaccaattgggggacacatccataaggaagactgtttctcccagtctcagaattccttagttgcctgagtttcccaattccatgttagcatgcctacagatatactcattgttcagttcttggctagacagccatattgatgatacttttgagctacagaagtcataaatattaaaggagaagctaacaccaccaccttcttagaccagcataagccatagctacatcctaaatattcattcttatatccacagataaatataggttttgctcctttgaatgaacttctttttgcaacagagaccattacagaaaccacaaccaatcaaactacaggaacaagagataatgggtgccacatccaattgatacactttcaatacaacttctgcatataatgctcaggggtcatagtggaagatggggtggaaagaattaaagagccagagaaacagatcactttgttatgcatctcaggaccaccagcccagggatgtcatcaccctctgtggaactgcgtacatacatcagtcgtttatcaagaaaatgcccactgcacttgtctataggttatctggtgaaggcattttctcaactaaggttcctttttcctgggtaattctagcttgtgtcaagcataaaataataataatgacaataataataataacaataataataataataaataataataataatgatgatgatgatgatgataaatcatccttccatacccatcctaggcttcttcttagaactcaacagatgaaggaaaagtgtgaatattcttccatgatgccactcccatggctccacagagctagaggccatcacacttccattcgattatctggtgataggaattaagtagatataggcattcacaagcacagcatgaacttttctttataaagacaaaattttgaagagccaacaggtgttggatttcagaaggcattaaccttcaagataataatgagagctcctttcttatggaagaaggatgcaaagaacattagatgcagagacacatttcaggttttctttaaggaagttgcaaagtttagcattgtttgtgtagttctttgtggtatttctgagcgaatctggaggatggagtgttaagttttcagctgatctgctgggcctgggatctgagaccaaaaagaatgaggtatgtagggagacactgtaaccatgcctcctaagggctggctacaggtgtgcctgaccacctgtcaaggtgaggtcaggatgactcatgatgggtttttaaggggctgcaagacatggggaaaccttctctctggcctgcctgccttgctgtccctggcttgcatttggctggtgtttatctgaataaagatatcttaaccatacggactatggattgattctcgatatagtggtagactacaattgaatgctatagacaatgttatttccgtttcactgtacttttgtatacaaatgaattaaagaaaacaataatccaaaaaaggctgtttcagctgagaaaaatcatggtcagaaaaacatgtaaataaacatcagtaagtgcatgctaaatattaacagagcatccctttcccagaacttccttgggacagtccaatttaaacacaattgcctggcatgcactatagattacacctgggaaggcacaaaagcaaggcagaaggccatatccagattgaaggttgactgaccagttgggttctatacttatattctgacatctaacaaaaataaatgtatcttattaattaagtgtaaatgtttttcacgggagtcatgaaatcacatcaattaacaatacagggaaaaaaatggacatgaggtaaaagatcctctgccttttcctggatcctttctcacagttccctaaggcactgttaaccatgggtcattcttttgactataatcagaaaactgagcagggatttgaaacacttacagcagagatgagaaaacaagcttattagagatatgatgaacaataccaattttcttaagcctggtaatactaatgtattttggtaaaagtctgttagtttacacaattggaattctctagtaatactgcaaaaggaggaacaaaatagttgattatggttgataggatgaagacttgttaaggagaatagagaaatggtgggaaatgggaaaaagctgtacactttccacagaactggtctcagaatggaagaagtaagggccagtaagggagggtgcacacagtagaaaatttgtaatgtgaaagactttactaatggtccaattgagtatcactgtctataaacattttggtttatcttgtgtggcagagattcaacatctcctgttctagtaataagactcagtggtaaacaatagatactgagcacctgaagaaggcagggcttaggaggaactgctgtgatcacctctacacctgcttctctacaatagcctttaaaccacacactcaaaagccttgtgtcccagctctaaagccccaatggcagttgaatccctgatgacttctggcaatgaaaagctagagcatgagttctgaggttgagtattagacagataattcttcttaagctttaattaatttattttaaatatatacatattttgccagcacgatgtctgtgcaccatgctatgtgtatgactggtacatgaggagaccagaagtgggtatcaggtttcctgggactggagttataaacagttctgtgctgtcatatgggcactgggaattgaacccaggtcttctggaagagcaaacagtgatcttaagccctgagccatctggccagtcctgttctagtcattcttcattggtagcaaataaagagtgactaaagagaaaacacagatcactgtggccatttcactagttccaaggagtccaaactcctggattagtgcaagccactaggacaggagcctggggagggaaaatcagaagttcctagatttgaaaaagattttttttcctttttttatttagaaacaatcattttacatatgaatcccccacccctttccctctccctcccaccctcctatgtccccgatggacccccccaattcaccctactccctcccccaaaatagtgaggccttccatggggggtcatcaaagtctgtcacatcatttgtgggagggcctaggccctcctccttgtgtctgggctgaaatagtatccctccatagggaatgggctccataagtccatttgtgcactttcgataaatactggttccactgttcaagctcccataaccttcccaggcctcctaactgtcacccacattcagaatgtttggttcagtccaatgctggttccccagctttaccactgggggccctgtgctctcactaagtcaggtcagctggttctgtaggtttctccaggaaagtcttgactactttgctcatccctcctccctctctgaaattggactcagggcttagctgtggatctctgtttctgcttctgtcagctactagatgaatgctttaggatggcatttagggtagttatccatctcattataggggaagggcatttaaggtagcctctccactattgcttgggttcctagttgtggttatccttgtggatctctgtataattccctagtgccagatttctctttaaacctatagtggctccctctattgacatgtctcttttcttgatctcctctattcctctcccaactcaatcttcctgatcccccatgttgtcctccccactcctcttttcccctcctctttctactacctccatccctccttcctcccatgctcccaatttattcaggggctcttgacctttctgattcactgggggactgtgtatacctctcttacactcctcatttcctggcttctctggaggtgtagattgtaggctagtaatccttttctctatgtctaatacccatatatgaatgagtccataccatgtttgtctttttgtgactgggttacctcacttaggatggtttcttttggttacatcggtttgcctgcaaatttcaagattctattgttttccactgagtagtactccattatgtaaatgtaccacattttctgtatccattcttcaggggaggggcatctaggttgcttccagtttctggctattacaaataatgctgctatgaacatggttgaacagatgtctttattgcacgaatgtgcatcctttgggtataaatctaagagtggaattgctggatcttggggggagactggttcccattttccagaaaaaaaaatactttctttaaagttccccatgccctctatataatgcctttaagacattctaaaagtctttaatggcatcatttaaaagctctatggttgagagtaagtgaaagtttgtaagacctgaggctatgaaagtctaatgtgaaaaaaatgttttctgaacactcttgaacccgcagtagctgtggctacctattcaagagtaagcctgtcaacatcatagggtggatgtgggggcaacacacaatgctctactcctagctaaagaaatattgtcttgtgatcactactgcgggagagagtcattttcttcaagagaattcttctattaggttacccatgctgaggttgggtagacgaccccacactcatgtgcaaatgggcagcactaatttgtctcaatgagttatatgcttcaaaagaaagaagaggaggggaggtaaagttgacaatagggcatgttggggaagggatccagaaggagtttgaggggagaagatttggatagatataatcaaaacttttatgaacttcttaacaaataaataaaattatataacaagaatctttgcttaaaatatcttcaaatactctgatttcctagttagacacttactgaagacaacaataaacaagggatagtgagatgctcactaaggaaagttttttatgcccaagagatgagagatcaacccccagaacctacgtaagtgctgagcatggtggtgtacacttgcagtcccacatctagaaagcagaggccaagaaattcctggatttcaatgtgcagtttagtgagaccaacaggacatcaaaacgcagtcccaaaaaaaacaagatatatgtcatctaaggaacaacacccaagcttgatttctggccactatacactctgtcccacaacatacagcaggaaattatggtgacctgaaggaaagatgagtggaaactgtgactgttctatccaaatgccagatgtgaataatatccacagaagcaagaattcgtgtatgtcatgtttctgaaccaatggaggacacacatgtaatatatatatatatatatatataattatatatatatatatatatcacaagtgttcatggattgacaaagactatttgtgttcttctgtagttattagacaaccttacagtttccaagattttgcaaatttaaattttatgaaaaatgagaaatttcaaaatattatacttattgattttcaaaccacattggtgaactaaatcttgaaataaatcatccaaaatgttcaagtaataaatcagtttagcttcactcaattcaaacatatcttagtatgtatgatattagtctataaatatggttttgtctatctctgcttccgtctttgttcctgttcttctaacacctagtaacatcccgtttaacacccctccaaacaagtattccgctgaatgcactttgggaaactctactgtgagggaagctgcccatctggtccatctattctggactttcaaatctcaactgcagttggcagagcagcacactttgaccagatagctatatataaaaatgttctggaaactttgatggcaacaaaaagattagtgggtctgatgaaatcatcactgaaataaatattctctattttaataattaattaacttctaaaaatgcatgggaacacatactttaattcatgctatatttcatgtctatttactgttttccccccataaatttctaagtgtgctcttattccgaaccaaatccatataaagacaaatatgacagatccactatcattaaagtattcatctaaggaaatggaacacaaaatggtaagagaaggggcgatgacacttgtacagatgccggtaacaaatacaatgcagagccaggcgcctaacacagcctggtatctatgtggccagggatgggaaggaacaagctacagaatacagacctccaggtatgggtaggaaaaaaggaaacgtactttcaatgatgttttaggtggcaaaagaagtcaagttacggcaagaaatgtatgttggggagctgttgtgttagtttatcaggttgggactacaatgtagcaaagcagccagaacaatatacaaaagtgttggtgagctgtacaaggggtgcattccctaagcaacctcaacctttaatggaggacacagctcacctcaaaaaaaaaaaaatgaaacctgtatgcaagaacttcagatctccagagcaggtgctcactatctgcatgcatctggccaacatatacggtggtggggggggggtgttctgacttccttcctaagttcccagtcaaaaaacaaaacgaaacaaaaaacccagatatactctgtcctctagtcaaacagaacacactgcaaaaacttcggggttggtgagaaggaagacctgcaccaatcattctctgaagtgattttcccttgcattggcttcctaccttctttatcacttagaatccagccattaatccagatatttatgaaagacctcagtgtctcctatcataccttactcaaataacatggaaaatttcctattgtccttatacaagcacacgtgtaattttaaggcttataaaaatggatttccattaaatctaatgttgatattcaggttgaatgtagtgataagtgaacatgaacacatgcttccttcagtgaatagcaatctataggctttctgagtcctggttctattatataattgaatctttataaattaatttgtctcccaaacattaggagccagtttctaaaatatttgcttgcgatattaagtttctaatagataaagtcacccattgccataataaatgaatagatcttataaaatcaactcaacaaattctttgagattttggatgatagaaatgtgaggaatgctcatgagatagagagacttgtcaagttaaaaatccctctaaaaggagaaattggctttaatgtgttggtaattgatcatttgaactcatgagtatggagtgcaatttatagtaagtgaggtacaaaggaaaagcctgtgtgaattctggaaggaggtccagagactatttaaatcagggttttatctgacataagcactgctgaatgccacagagctgattctgctactgagggtcatgggcagtatacacattaaaaccatttcagttcccctatggactctaacaggctgccttgtatgctctccagaaatgtcatactgttgagcgacagatcacttctcagtacaaagcagcaatcagatctcctaatcccacttctcttttgcacagatattaccatttcaatgtgtggcttttcattttgctgagagggttttcatcttcacccaccccctccttaaatcaggcaaagagacaagtaactgacttcagttttcaaaaatgtaacccgcaagtgcataattcttcctgtcagatttccttttctgtaagttggtgagtttattgtggtagcactcaaaaggctgagcctgaaaagtcctacaacatatggcatacatttaacatggcttgtgaattaaaaataacagcctgccatctgcctctgcaagttgattttatcaaagtctaaatgagaagctcaaagacgtgaatgttgtcaattaaaataagaaatactcaagttcaatgcagtgaccaatccaggcatatttttttgcattggactagttatccactcacttcactcctacaaattgaaagagatgcacacatttcaatctacagtgccattttgtaacccttacttcttgttctttcctatcttaaaaaaaaatgtcgcaaatttagcgccgaaagttacctttctctaggaatatattgtgcatatttcttttctgagattatactagactcctgaagcactgatttaaactcatgaaaccttccttctgtgtagttttctatttatttttttctagctttgagaatcaactaatagatgttggaaggaaggttttgatgactttccatcatcatacatcttttacatcctttacacatttttggaaattctctaatatgctagtctgtgtcacacttccatatgtcattatatttgggttagcatttattgagcaactatatcacaaatatcccccaagaggcaagggtcaggtaaaatatttgagaaagacttaagatgatacttttagaaatttgttttagagcttagaaaagatatgtatgtaagaaaatatttgatgtgatgcctatctccgtgcagccaagtattcagatcattatgccagcaatgaatgccttatgcattgtagaaagacggcattctcctctgcagtttttaaatatgagggcaggaggctttgctggcatacatttccattttggtgttgagtatgttgggtaaataacaaccaaaagcttgatgtgataaatataaagaaaatagacaacctaaatggagttatgtagcaaacaaaattctcaagttttaactctaaattaactctaaattgactgaaatctaacttgggaaagtttataggaattcatagtttcctaatttagatgaagaaaggggtaaatcaaaagacaatgcagagattcctttagtcacttgcaatgaatactagcattgactgatagatggtacagttagggttttcaaatcacgaagaggaggactccctggaagaggcacatttaaggcataagacagaattttaggactaaccagctattcaaatgaacttcaatatgagcatgatgttacttacctgcagtacagttgctgcaataaattaccccaaattgtgtggcttactgatacagaatgtgttcctggactcttctggaagccaggaaaaactccactgaatgtggtggtggagccacacttcttgtaaaagctctgagtatattctcccttgccagcctctaccggctactggcattcactctaggcttcctggaaatggaagtatgactaaatcccagcctctgcttgtacagaacttttatacttttttttttttcaatttcctcctctccctgtagaacactctgagatgttgaattatgagttctccataatccagatctattttatttctagctatttaacttaattacatcagcaggccctattctgcaagtaagtcatatttccaagtacttgggctacagggtagacatactagtgaagagagaacacagcataattcaacctaagtacacagaattgcttgctcccaaattacaggttctaaaaaatctgtactagatagtagatatcttatttgccaaaagatttcatcgacaaatttaaagaaaaatactgagtagctccatttctttctataccaaatacatgcatagacagacatatatatatatatatatatatatatatatatatatatatatatatatatataatgaaaggactcattacttaaatgattgtgtagtctgatgactgaaaaggagtcacagaatgcaacaaagactatgggaagtaccaatgtgaggttgctctatatttcttagtgttaaaccttgaagagccctctgattataaacctgctcccaaatctaaataaactgataaccactgatgtaaagtaaaagagacattttaatgataaggttaacaatgcacattaagcactgttcccaaatccacaaaatcatttggtaattcttatctttttttctggaaagctaataggttctattattcctaatcagagaaaggcctttggaaaaaaccatgctcaaaatcccactaatggcaagagcagggcttaatttacaaactctgtacatttttaaagtgaaaactcacactgcaggaatgccaacatatcaaataaatcaatgcatgcaatcaatcatcttaatgatagcctgtagttatcaggtgtaaatgctactctgaactctcacaattataagctaaagccctgattctggacataaacaactcactgtagttacacacaaatcaacctcaataacatgaactaaatggaaacataattgaagttggttaaacatttacagtctcctcatttatctttcaaaaatggaggcaaactacagagattttgccacccataattgaagactttccctaaaatctatcaatagctattcaagctaaataccacttcctattcaaattactgcagttaagtgaaaacacaaagcagaatgtgaatacaataacagttttgagatcatggcaatgagtccaattttaagtccaaattataagtcctgcacatcaagtaaaaagaggaaattatctttaatataacctgtatgcattctaggagatattatgggacatatttgagactctgtgtgtagatctggggttgtggttaggataatgatggaatgtagggctccctcgggcaaggagtcacttcagtagttgggattcacggatttcctgtggatttgagctgctgtcatcaatgtgtctcctttcatgcctgaaggtgagagctttcttttctcattttcttggcaatatttctggtatgaggcagtgatatcaacacaaatattagttactgagtcatagctgaaactttctttctttccaccaatgtgtttaacataaggatatacattcataacgctcttgtagtttcagtacctaagacagaagactcaacacattaatctgtcctcatggctctacagtgtagaatccattacaccatgggtcactgaattagaatgtgaatgtgaaatggctcccataggcttacatgtttgaacaacttgtctccagttggtggcaatgtttggtaaagttgtgcaatctttagtgtgtggaaagtcagagaaatgagtcacaatgtgaagttttgtcactcagtctccctcagtgtttatcctctgcttgctcaatgaagatgcagcatgaccagtctccctgtactgcagccttctgatccctgcctgtgatgtcttccttaccagaatggtctgcaatcaccctacaagttaaaatgggtgtatgaaccataagaactgtaagttaaaataaacctttatttagtctacttacttgatttgtgggagtgttctatcattgtaaagagaaagtaattaagatgtggtgttagtgaaataattcattgataaaagagtttttattttaacccagttaattcagtatgttagtctacctaataaaaactactatattgtaaatatgcttctcttttttatagtgttgagttttgaattttgcacgggtgcattttcccaccttctgataccagtccttatcatctgatgacagccttatacagataagcctatttgtctgccaacttcagccatctgaaaactatgcagagatagtaccacattcccaatgaccccaggccattcaacctgagtaaattgttgaactacacatttcccggaccagagacttacaatctaaggactatggccttgataatacaacaagatcttaaagatgtcccctacacagcattgagttagtaagaacttacttaagacagaaaagacctaatcttcaaactaggggaatataaaaatatatagacaaagaatagataacattttcaataaaatcttagaagaaaatttcccaaaccagagaaagagatgcttatctgtgtactagagacataaagaacagcaaacatactggggtcataaaataaactccctataacataactaaaacacaaaaagcattgaataaataagggctattcacagctgcaagaaataaaggtcaaatcacctataaaggcaatacccttacaataatacctggtattttgacagaaacttttcaagccagaagggtctgaaaagatgaattctgaattctgaaagaccataaatgtcagctcccactattacacccagcaaaattagctgttacactgaatgttaaattaatctttcctttataaaaacaaattaagggaatgtatgactactaagatagccctacagagaatgtggaagaacactttagtgttaagacaagggtaaagatacatgacatgacacagggaaaagataaacaaaatcagaacagttaattcacaaaggtctaataaaataccacaagtcaacaaagcaatgggagttagaaggtagctttcaataataaatattaatattaataaactcagtgtctcccaaaaattcaaagactaggagattaaataagaagatggttctcatgtttcttgatgctacccagagacacacttcattatcagtgatagatgccaccttaggataaatgaatggaaaaagatattccaagaaaatggaactaagaagcaagcagccatataaactggcatgtccaatatttgacaaagctgaattataactaattaaaagagattgggaagactatttcatacaaaaggaaaaatgaatgagatgatattataattctaaacataaatgtatcaaacacaggtgcaaccactatcactgttagatctaaagcaacaaattgatccccatcagaatgatgtagttgaatttaatggcacctctcatcaatggaaaaatcatctagtcaaaacaagacagagaaatattagaattaaattacacaatacatcaaattgacctaacagacatcccgattgtaaagatatactacagagctatgatgataaaaacagcaaggtgctgggggaaaaaaatcaaaaacagacacattgatcagtataagtgaatttttggtctttcaagcataaattcacactcctatggctatgttatttttagagtccagagatgcaaaacttggagataaaacagaatcttcaacaaatggtgctatccaaaacatatagatacatgcaaaagaataaaactagatcctctctctcaccctgaacaaaacttaacaataaatagattaaggacttcagcacaagatgtagttgagtttactagagaaaaattttggaaaaatgtttcaacgtataggcacaaaatatgctttctgattacgatgccaacagcataggcattgaaaccaatattgaataatgggacctgatgaaatttaaaagcttctgtacatcaaagacagaatatattaaaggataagacagcctacaaaaataggaaaaaaatctttatacatctaacaaaatagttacaaatctaacaaaaaagaaaaacaaaacaaaaaataacaattgcataaacaaattaaaaattgggatatgaaacttaattgtgagttctcaaaagaagaaatacaaatgcctgggtttttttaaagattaacatccttagccattaaaaatacaaattaaaactactttgaattccttcataatctagtcagaatggttgcgattaaaaataaaatgacaatagaggctagcatggatggagtgaaagggaaacactacttcaatgctgaagaatgggtgaaccagggcagcactgtgaaaatcagtatagaatttcctcaaaaagatagaaatagatctaacatatgatccagctatacaactcctgggcatatacccaaaggactacatgtcctaatgcagaaatatttgcaaatccatgtttattgcttttctcttcataatagaaggaaatggaaacatcctatatttccatcaactgataaatagataatgaaaatgtggttcatttacacaatgaactattatttagctattaagaaaatgaaattatgaaatttgcacataaattgatggagctggatacaatcattctgagtgagataagccagaaccaaagagacagaatcatacattatttcttgtatgtaaatgctcaatttgaatatttagatgtgtattgttctgctgactctataacttgacacaagctagtgtcattatggaaggagcaatcataacctaaaaacaatgcctccataggattggcctgtagacaaacaagtctgtgggatgttatcttgattaataattgatattagagggtccttcccaatgcaaggggggttgaacccttgctaaggtggatctggggtatataagaaaatagtctgagcaaaccatgaaaagcaagtcagtaagtagaactcctccatggcctctatatcagtttctactccagcttcatgctctgctagagctcctaccctgacttcctccaatgatagacagtgatgtggaagtataagtaaactaaagcctttcctcttcaagttgcttatacaccatgttgtgttatcacagcaataaaaaaccctaactagggcatatgtatttaaactgaaatacccatagaaatcagaaagcaaataagatggggttttaagagaagggaggtgcaacagaggttctatgaaagaagaactggaataatgaaggaagaagggttaagtggggtggaggatagggaggcatggtaggaggagtatagagagggataaataacactactaatgaaaaagctaaatagaagcatactatggtataagcttcctaaagtatttattgataaaaagggtttaaatggagttatcctacaacagtgagacaattcctttccgagaccccataggctaccaataaaaagctcaattctaggaaatgatcgcctcttttagagttattggccaattatgtcccatagaaccccaaattataagctattgcccttgctcttggttgcattcagaactcaatggtaaggccttttgctgaagacaaaattattgtgtcaaagatcatgaaaaatcaaatcagtactcacctggaagcatcatggttaaattccgtggcactggaatactaaatgagagcagttatcaccagtcttacccagttatgcaccttctgtgctgcaaaaaataataataataataaatgatcttagcaagatatcctcactgaagcaacagtggcatgaatgatatgggagtaaccatcaagtttctgattggatttaagacctgttccccgaaattgatttattgttatatcagacataagtatatcccccagcttacataagagaagcttcttaattttttgtaatggatggcaattaacactgaatctcataactggacaagatgcagagagtaatagactggagtgctccagacaaaattgcctaaatgagacatctatatcacatccaccttcctaaagcttatagatcaacacagagaagaagggagagagattgtaagagctgaagacagcagatgattacagcagaatgttttctgggaaaaatagggactgtttcacatatcagcccctagaagctgtgacagcgttcacaaatcctatagaatatcaagccagaaaaagttccaaaatgaaagtaggaggtagatatgaaaccccacccttagatgaggatccattggtaactgagagctgcttggaaagtgagatcaaattttctttcacaatgttgactctgagaagttacccagcagattgtcctacacctgtgcacatactgaaaggactaagaagagaatgtgtgaaattgggaaggaataatggtgggtggtataaggaggaatttagagggaggtaatatgtggtagagttgatcaaaaccactatatttattatataattttccatttttaaaaaagaaaattacttacctttggtttaaatgcccaatattttattcattcatagattttgatatcatttgcagaagtttggagtgggcataaaacatggtttacaccatgagaagaattcatattgaacctttccaagaaagggttacattgacttctcaatataaaaataaggtattaaggaaaaatacacaagagtagattggtttcagaaaaattgagttccttataaaacaaagctgacaaatacatgaagactgtagctggttgttttgaaccccctgattctcaagactattctacttgaccctatgaacttatctttttgaaggaatgatccttggtaaattcaccaagggacatctccagttgtgaaagtatttgttcccctattggcctcccaaattgtcaaatttcaaaatgcttcttttttgccatcataatctagtcagataaaattttgtccaggaaaagaaaaagttcaacaaatttcacaagaattttgcatgggtgatagaaaatcatgccaggggcaaagaaaaataaaggttggagcagactcaatgtgaccaacagagaaacagccttcaaagatgaataagcaatgacaacaattctaaaagtgtcagagagaatatggctgtaaaccttgaggaattttgaatctatgagccaatctaataagtaaaggaataaatgtctgaagcagtttcaaaactagaaaaatgggtgtttccaaagtatttctgtaaatcaatattttaataaatatgttcaagctagtagaccccttaatttctgttgtaaattttctgttgcagcaatataatgcatgtgtgtttaaaattttttatttataaaaatagcttaaaggtcagaatcttgtcctcttagcaataatttcctaatgcctgaacaaaataataattcgctttttaagtgtatacctggaaatgttctgtattaatttgaaagcttagtttcctattttttataaaagttgcaggcaatgtcatctaaaagactgcatgttgtcttttattatcatgtatacatcataatataaaatttggcaatcatctaaaacataattttcattcataataaggattttataaatattatatataaccactactgtgggatgttctttctgtatgctttaaatatgtattactccaattgtttagtaataaaagctatttagcctatggtaaggaaggataaagttaggcagaacaatcaaactgaagactcagatgaagaggggcagaatcaggaagagacaaaagtcagcaccctccccaccaagaaaaggatgccagcagacaggtaaatggcatggccacatggcaatacatagattaatagaaacaggttaatttaaatgtaagagctaattagtaataagtctgaactataagctaagcagtttgtaattatattaagcctctgggtaattatttaaaagtggctgcagaaccaggtagacagagaaaactcctatcaggaaaatatggatattcaacatttattaactatattcattaactgagtcttgaagcaaagattttgtataaaacacagttttaaaattgtgactccaaataaagcactccagcttttggcagaacaatacatccattgaaactggttttaaaatctaaagtgaaaaccaaaaaaatcccagcttgtgatcatcagacacatactcaggagggcagcagttacagacaaaagtttagagtaaatgaactagcacagaggtgagcagaaatgtcccaggagctactctcctgctcaaggcatttctatatttttggtacaggtgagagtctgagagtctgagaaacagaacattgctaagaggcagaaagcccagaagagcaattgaaattctcacagggctgagcaggtggcattagttcagggatttcgctggagctagaatatggacatataaaagattcaaaagcaaaaggaggactgagaaaggaagctcggtgtgtacaatgtttcatgggagtatctgtacaatacttaactgcttaaagaataaagttaataagccaaacaggcaagatctgaaacaccagggataattttcaacagtttcactgtgattaaagaaaaagaaaaaaaattacagtcaagaataaaggccaattcaacacctatcacacattgtgcggctctaaaagatcacttctaaagattggagcacaccagaggtagagccaagttctaaaatcgacagcttagccaatacccagctgaattcctcaaagcaagttcatcccactccagcttctagtaacaggacagagattctccgatggcaggtatgaccatcgagagccactgtggtttacacagcctgtttagtaataagaaattagaaagaagagcaaagtgaaaaggaaaatgacaataggaaatgtaatagacaattcaagtatcccagttatgaaaaatggaacttaagtatgattgccacatttaaacataaaaacatttacataaccacaaaaactatatgctttaaaatggaatcaagtggtagattcattgttagctttttgagggctctccacaccgatttccagtgtagctagaccagtgtacaatgccatcaatggggaataagagttcactcactattccccaaaccctcaccagaagttgctgtcagttgtttttctaaacatcctattcctcagatacttgtctagcaatgcttattgctgttatattcgcatcagctataaaatggaaaaaacctaaatatccttcaactaagaaatgaataattaaaatgtggaacttatgcactataaaatactattcagatgtaacaaaacataaaatcatgaactttgcaaataaataaatggaattgtagaatatcatattgagtgaagtaaaccaaacctagaaagacaaatgttgcattttctctttcatctatattttctagcgctatatctttatatctttaggtgtgaatatcaaacatgaggtaactgcagaaccaggaaaactaaaatataccatgaaagatggcaggagaaatagagaagagtctaccagggtatgtataatttaaatggggaaaattggagggagagtgagattaacaaagaagaaatggggtaaagtaacaataaggatgtataaaaagtcataaaagttaaaatcatatcattagttatctacctaatgtaacaaatagtacatgtaagcctacataattttaatgaaattttcccatctggtctgattatgcttcctctaagaatcatggactaacaaaagccccaacaccaagcatggtgttgttttcttcttttgagttgttttcatgattgtccaagagactcccaaaacgtcataggctattaatattgcccttgattgcctcccagaggcagaagaaaactaaatcctcattgctaaagattccatgtgcttaggatattggaccagggagttatgagctggttctaatattaaagtcccctcccctaggactaactttcacggtataagaagatcccacataagcttccaagggagagaagcaaccaatgttttatgaactaaaagaataataatcttaagggtgtaatagtggcacacatacctctgcagtaaccaatagctctctaattgcacttaagtcccactctacaaaagggatatcatgaatggtactggaaacacagacaactatactaggataatgaagtcaaatattttagaggaaaacatacaagtctcactttactaattacataattcctaattacagtgtaaaaaatttatcttaatactcatatgtaagtataggtctcatttcccatcaatgaaatgtgtccttgcaacagacagggactattacaaaaaaacaatatcaatcaaaatgcagagagcaaataaccttaggacacccagtcctaattgttacctctacagcataatttatgaacctaaggctattaactcaaagccaaaaacaggtcagaaatatcaaaagagccagaggaacagggagtttgctgtgagattagatctcccagaaatatcagagaagctatacccatgaagtattatcagcacggtagtctaactgtagcctgaacaaggatgacacctatggacatgctaacatggaggggtgaaatctcatggggcctcaacctaaacaaaacaattgcaggtaactagtaatgttgaagtagaagaaatagttatccccagggaagatcgccaaattggtttatcaaataccaagtgatcagtcctaaaattatgtatatacaaatgatattatacagactgagcaatttgtatttgtatatttaggaatgtgtgtgtgtgtgtgtgtgtgtgtgtgtgtgtgtgtgtgtgtgtgtaacaacattaaagaaaaaagaggaatgaacaaatcaaatttgttaagaaaaaattaaatgaatttgagagagatcaggtatgtgcataggaagcgttggaggaataaaaggggatggggaaatgatgtagttatatttaacttcaaaaaataaattattttaaaaaataagcaaaaaactaacacagactggaagaaacaatgttgtaacctagaggacaaatagtggtatataaggtaaataatggaaagtaaagtatatagaaaacatacaaaaagatataaagctgagcttgtggcatacagctggaatcccagcactggtaggttgaatcaggagaagtgtaaagccagcttgagtctgcacagtcagattttccctaaaagttcaggtaatgaatgaaacacataaagtatagtaaaatggtctcaaataaagtaattggaaatatgacatatagggaaaaagaacaaagacagaagcaatatttaaagaaataacaaaccagaatagtttaaatgattaaggaatgaggtccagatttaaaaaaaaaaaacaaaaaacaaaattttaagcagactacgtgtcaagctctagaggcaatatagcaaaactggaaactgtttgcagagaaaaacactacccacataaaaggatacactgccttgtggatacaagcaaacttgacggctgaaactatggaagtgaataaaactgaaggataccttttagtattgatagaaaatgactaaaatatcaaagaaaatgaattttagcaatattttgagatagccaatctcataagtagtataattaatagttgtgtactgaaaatttgctgagagggttttagatactctaaacacacagaaatactaataaatggtgttagatatgcaaatttgtttggctgtaataacaatttcattttgtatagtataatactattttatatgccccaaataaatacaaaacataaaattttaattgttaaatttatagcacaacaaaaatgaagctataactgaaagaaaaatctgactgagtaaaagaagaaatatatctattaaccaagaaatcaaactggcctaaaatcaattacttcagaaaagataaaatttttgtcttagttagggtgtctattgctgcaaggaaacatgatgaccaataaacaagttgtggaggaaatggtttatttgacttacacttccacatcactgttcatcatcaaaggtagtcaggacaggaattcaatcaagaaagaaacctggaggcagaagctgatgcagaggccatggagggttgctgtttactggcttgttcagcctgctttcctatagaacccaggaccaccagccatgaaatggtaccagttacaatggattgggtcctccaccataaatccattatgattttcatcaattaattatgaaaatgctccatagccagatcataagaaggcattttctcagttgagtttccctactttcagataactctagctttttgttaagttgacataaaactaaccagcacaattggcctatgcggcatgtttcatttatctgcatacttctttctttgaaccagattttgacaaatttgaaacacaaagtgagtaaaagcaaactgcaaatgaatacaattgcatatactaaggctgaagagatcactcagaggttactgtatagtgctcaggcagaggacggttatccagtttacaacactcaaaacagatggctcacagttacctgtaactttagctccaaggaatattcttctctcttttggcctccacagatatctacattcatgagcatatacatatagacatacatacacatacataattaaaaataaaacaaatcttatataaatactatatatgctgtattttctggtcaaaatagaactaggcttcaaaaaataaataaataaataaataaataaataaataaataaataaataaatctcacatactaaaaaaacaaagctacatgcttctaaataacctttatgtcaaagaaaaaaatgagattgatgactaccttaaatgccatcattgagccttcatccagtacctgatagaagcagaagcagagatccatagctaagcattaagctgaattcctggaatccagttatagagagggaggagtgaagagcaaaggggtcaagaccatggtagggaatcccatagaaatagctgacctaagcaagtgggagatcagggactccagactaacaactggggaacctgcataagactgaactagccccctgaatgtgggtgtcagttgggcatcttgagtagtctatggtgccgctggcagtggaatcagtatttatccctggtgcatgaactggctttttagagcccattccctatggagggaatactctctcagcctagatacaggtcctacgtcaaataatgtgacagactttgatgagctcccttgggaggcttgaccttctctgaggattggatggggggggtgggatggggagatgatggagggagtgcaagaataggaggaaaagggaactggaattgatgtaaaataagactgcttttaatttaaatgaaaaaagttaaaaaagaacaaaaagttataaaatattttgaatggtaatcaaaatacaacatatcaaaattattagatgtaacagttgaattgatgagaatttggttggtagtactaaccatacatattaggaaacaaaacaagtaaacataattagataaatttcaattagcaaagttagacaagtaattgcaaataaacttaaagtaagaatagtgtaatagtaaaagtcaataacaaagacaaaaggaggaaatacaacaaagctaaaatttggctctctgaataaagaaagccaaaattaccagtatcagaatgaagggtctgcaaacacttctggatgtaaatgacaggcatgacagggatcttacaaaattccagcaaagaaaaagtcatgaccacttcacagctcattccataaagacaggataataaaacagcaaaaggacataatgataatggataactgtgagcatgtttttctcataaatacaagtttagaaaaagtaaactacatatcagcgaacagcacactaagtaaatgaaaagatatcaaaatgtatttattctggatttgcaaggcttatttcatcttcagaagtaaccagtacatattatcacataaattagtacataagctggacaactaaactactcaaccaaagcagcagaagtaggaaaactgagcatcatccatacctaattcaaaagttaccacatcgaaaattgggcaagagcttcctttaataattttaactttcaacaaatatcatagataattcatggaagattcatatgcaatttctcatgacaaggaaagagtgaaagaagacttcagcacttctcttatgcaagagttcagaacctccatcccacagttggagattcaaatatacatcctcaaacatgggagtagctgtttaaaacaatagccacagtacactaataacagcacaaaaacaaacactgaaggagcggtaagttgtggagttaccatacagatctcaacttattttccatgagaacaaaaatgaaatcttctctaagccaatggcatttgggacttgataagttctcatgcaaacaaaatcctgacaagctgatatgttaattatctataacaatatatagttcaattttatgaccaagtttcaaaccaatgctagtgggcatcaccacttgttcactgagtgatttgtttttcctgactttcttctttcttttcttttaattggtttttaacattatattaaatcctggcagaaaaatatagagaaatttccagtatattgttttcctctacacatgagaatttaaccactagattaacaacactagaataatgtcagtgcaatgactgcatctgtttttagaagcttcccccatgcaggcaaaccttttccttctgtccaaatacaggtgggatggagcatcaagtgtcatgagttactggctctgctctagaaaatgtagaataagcagaggtgaagagatcaatggaatgagaccatacgctcaaacatactgcatatgtattggcagagacaatggaagtgttaagacatatcacaatgtgccaaaaacatatataaaaaataataaaatagcccttgtcatctctgtcaggttgttggacagcatttcccttaaaatttaaacagtacatttgaccaatagatcctactttcttttcccttcttccacccttctatattccaatgtccagaaagaatccaaaagtctttaaaaagagaaacgaaaatctcttttaaaatgatgaaattctaaatatctccaaataacaaagtattgatttctgtaaatatatgtcatgtttacagaaatatatatgtagtaatatataactgaatattatgtatctaaatattgcatatataacttaaaattgcataaatataaccgattaaaaactgaaaaggtagttttctttttctaaaattatccatgtctcctaaggaacatgaccagggtattgtaaagtagccctcaataattgttactgtttggctcctcttcatcaattacttttctctttgtgttatagctcaatctgatagagcaaatggatcaatggaacataaccagccaggacttccttaaatatgacaagttttattctaaaactataaataagaatctgcaagcaaaataacagaaatgtgaatttcataaatattccatacaagagagatgatcagcaaatgatgaagtcaaaagttgggtttgggtgagggagtcactctgagtccttcctgtaagtttataagaggccataaaataaattacattggaaaatgagaggaagtgtagataaacacaattcttggagcctgaagaattactttctaattttcttaggagatcttgtccctttccccttctccaggggaccatgtatatctctcttagggtcctccttgtttactagcttctctggcagtgtggattgtagactggtaatactttactctatgtctaaaatgaacatatgagtgagtatatatcatgtttgtctttctgtgactgggttaccccactaagaatggtttcttctagttccatccatttgcctgggaatttcaagattccattgtatgtttgttttttgagtttgtattttgtttgttctcccccccccccgcgctgagtagtactccattgtgtaaatgaggggagagggaactaagagaatgagaaggtgagaagaggaaaggtgaggaagacatgatggggcagggaggttgagtttggggaagaacagaagagagcaagataagagatactataatagagggagacattataggtttaaagagaaatcaggcactagggaaatgtctgaagagctacaaagatgacaccaactaacaatctaagcaacagaggagaggctaccttaaatgccctctcctgataatgagattgatgactaattcatatggcatcctatagccttcatccatcagctggtggaagtagaagcagaaacccacagttaaaccttgaactccagttgcagagaaggacagatgagcataggagtccatatcaggcagttgaagcccacagaaacagctgacctgaacaagtgagagcttttggtccccagactgatagctgggaaaccagcatgggactgaatgtgagtgtcagtgaagagaccttggaaatctatgtggccccttgtagtagatcagtacttatccctagcataggaatggactttgggagcccatcccacatggagggatactccctgagcctagagataagggggttgccctaaaccatatcccaaagaatatgacagactttgaagaccccttatggaaggcctcgccctccctgggagcagaaagggtatgggataggtagggtattagttgagttgacaggggggaagggagggagagggacctgggattaacatgtaaaataatcttctttctaattaaaataaaaaggaattactttctaaggatgtaatccatgcccaaaagatcaaagagaactttgtcacagcccagagagattactaccaagactttaatgccctacttcaggagaattgaaccaacctaagaaaggcatgtggatgtttattaaagatgttaatgaacaaggcacgacatattcctaattcagactcccaagggaaatataagattgtggtttggaagaagaataacttgtttaactgctgaagaacttgtcttccaaaaatattaaaatattaaaagtcaaacaatttaaaactgatccaagaagaggaagaattctataactgctgctgctactattacttcaagatattacccataataaaataagaatacatatatttatatattctacagaaagccttctgctgaacctaacagaaataaaatgagattagtgatagtacagaaattggatcttctgaaatgagcgcaaagtctttgaatatgagaatccccacgcatacgcacactcacaggcagacatacttgtcaccatctgccagcattacttttaagatagggggtggcctttctggggaacataggtttgtgggacagggtcctggaggtgtgttgcctttggacccttcccatttctctctgttcctgtctgtcatgatgtgagtttctctgtcacatccttcctatgaagtgtactgaatcctctgaaacttgaagttaattgccat
